(19) United States
(12) Patent Application Publication
(10) Pub. No.: US 2003/0233670 A1
(43) Pub. Date: Dec. 18, 2003

(54) Gene sequences and uses thereof in plants

(76) Inventors: Michael D. Edgerton, St. Louis, MO (US); Paul S. Chomet, Mystic, CT (US); Lucille B. Laccetti, Groton, CT (US)

Correspondence Address: MONSANTO COMPANY, 800 N. LINDBERGH BLVD., ATTENTION: G.P. WUELLNER, IP PARALEGAL, (E2NA), ST. LOUIS, MO, 63167, US

(21) Appl. No.: 10/310,154

(22) Filed: Dec. 4, 2002

Related U.S. Application Data
(60) Provisional application No. 60/337,358, filed on Dec. 4, 2001.

(51) Int. Cl. A01H 1/00; C12N 15/82; C12Q 1/68; C07H 21/04; C12N 9/24; C12P 21/02

(52) U.S. Cl. 800/278; 435/6; 435/69.1; 435/200; 435/320.1; 435/419; 536/23.2

(57) ABSTRACT

The invention provides polynucleotides and proteins encoded by the polypeptides. The disclosed polynucleotides and polypeptides find use in production of transgenic plants to produce plants having improved properties. The invention further provides methods of producing fertile transgenic plants, preferably maize, with desirable phenotypes and progeny of any generation derived from the fertile transgenic plants.

### CROSS-REFERENCE TO RELATED APPLICATIONS

[0001] This application claims priority under 35 U.S.C. §119(e) of U.S. Provisional Application No. 60/337,358 filed Dec. 4, 2001, the disclosure of which application is incorporated herein by reference in its entirety.

### INCORPORATION OF SEQUENCE LISTING

[0002] Two copies of the sequence listing (Copy 1 and Copy 2) and a computer readable form (CRF) of the sequence listing, all on CD-ROMs, each containing the file named pa_{—}00432.rpt which is 3,660,811 bytes (measured in MS-Windows 2000) and was created on Nov. 26, 2002, are herein incorporated by reference.

### FIELD OF THE INVENTION

[0003] Disclosed herein are inventions in the field of molecular biology, genetics, and plant biochemistry and plant biology. More specifically disclosed are nucleic acid sequences from a variety of organisms, including plants, cyanobacteria, bacteria, yeast and other fungi. Further disclosed are arrays, oligonucleotide fragments and DNA constructs of such molecules. Also disclosed are proteins and polypeptides which are encoded by such nucleic acid molecules. Also disclosed are transgenic organisms, preferably maize, with expression of such proteins.

### BACKGROUND OF THE INVENTION

[0004] Maize, Zea mays L., is one of the major crops grown worldwide as a primary source for animal feed, human food and industrial purposes. Maize plants with improved agronomic traits, such as yield or pest resistance, improved quality traits such as oil, protein or starch quality or quantity, or improved processing characteristics, such as extractability of desirable compounds, are desirable for both the farmer and consumer of maize and maize derived products.

[0005] The ability to breed or develop transgenic plants with improved traits depends in part on identification of genes. Whereas the unqiue sequences disclosed herein that were identified in the maize genome may be useful both as mapping tools to assist in plant breeding and in transgenic maize plants, unique sequences identified in species other than maize will primarily be useful to confer novel phenotypes in transgenic maize.

[0006] Disclosed herein are DNA sequences useful for breeding or to express transgenes in maize to effect traits such as nitrogen metabolism, steroid biosynthesis and signaling, beta-carotene synthesis, cell division and cell cycle, pest resistance, including disease, insect and virus resistance, light perception and associated signaling processes, growth regulator perception and associated signaling processes, cold tolerance, heat tolerance, grain qualtiy, such as modifications in oil, amino acid or protein, or starch compositon, resistance to abiotic stresses, such as water limiting conditions and oxidative stress, nutrient availability and utilization, such as phosphorous or nitrogen, and factors generally effecting plant growth reproduction and vigor.

### SUMMARY OF THE INVENTION

[0007] The present invention provides isolated polynucleotides which comprise a nucleic acid sequence selected from the group consisting of SEQ ID NO: 1 through SEQ ID NO: 368 or complements thereof. The invention further provides recombinant DNA constructs comprising a polynucleotide selected from the group consisting of SEQ ID NO: 1 through SEQ ID NO: 368 or complements thereof. Furthermore, the invention provides transformed cells or organisms comprising a polynucleotide of the present invention, prefereably where the transformed cell or organism is a plant cell or plant and most preferably, wherein the transformed organism is a plant selected from the group consisting of cotton, wheat, soybean, maize, rice, canola, teosinte and Arabidopsis.

[0008] The present invention provides substantially purified polypeptides encoded by the polynucleotides provided herein, where the polypeptides comprise an amino acid sequence selected from the group consisting of SEQ ID NO: 369 through SEQ ID NO: 736 In addition, the invention provides polypeptides having at least 70% amino acid sequence identity with a polypeptide provided herein.

[0009] The present invention provides a recombinant DNA construct comprising a polynucleotide selected from the group consisting of:

[0010] (a) a polynucleotide comprising a nucleic acid sequence selected from the group consisting of SEQ ID NO: 1 through SEQ ID NO: 368;

[0011] (b) a polynucleotide encoding a polypeptide having an amino acid sequence selected from the group consisting of SEQ ID NO: 369 through SEQ ID NO: 736;

[0012] (c) a polynucleotide comprising a nucleic acid sequence complementary to a nucleic acid sequence selected from the group consisting of SEQ ID NO: 1 through SEQ ID NO: 368;

[0013] (d) a polynucleotide having at least 60% sequence identity to a polynucleotide of (a), (b) or (c);

[0014] (e) a polynucleotide encoding a polypeptide having at least 70% sequence identity to a polypeptide having an amino acid sequence selected from the group consisting of SEQ ID NO: 369 through SEQ ID NO: 736

[0015] (f) an oligonucleotide comprising from about 15 to 100 nucleotide bases, wherein the oligonucleotide hybridizes under low stringency conditions to a polynucleotide of (a), (b) or (c); and

[0016] (g) a polynucleotide comprising a promoter functional in a plant cell, operably joined to a coding sequence for a polypeptide having at least 70% sequence identity to a polypeptide having an amino acid sequence selected from the group consisting of SEQ ID NO: 369 through SEQ ID NO: 736, wherein the encoded polypeptide is a functional homolog of the polypeptide having an amino acid sequence selected from the group consisting of SEQ ID NO: 369 through SEQ ID NO: 736; and

[0017] (h) a polynucleotide comprising a promoter functional in a plant cell, operably joined to a coding sequence for a polypeptide having an amino acid sequence selected from the group consisting of SEQ ID NO: 369 through SEQ ID NO: 736, wherein transcription of the coding sequence produces an RNA molecule having sufficient complementarity to a polynucleotide encoding the polypeptide to result in decreased expression of the polypeptide when the construct is expressed in a plant cell.

[0018] Of particular interest are recombinant DNA constructs, as described above, wherein the construct comprises a promoter region functional in a plant cell operably joined to a polynucleotide of the present invention. The polynucleotide may be oriented with respect to the promoter such that transcription of the polynucleotide produces an mRNA encoding the polypeptide. Alternatively, the present invention provides recombinant constructs wherein the polynucleotide is oriented with respect to the plant promoter such that transcription from the polynucleotide produces an RNA complementary to the mRNA encoding the polypeptide.

[0019] The constructs of the present invention are useful for production of transgenic plants having at least one improved property as the result of increased or decreased expression of a polypeptide described herein. Of particular interest are uses of the disclosed polynucleotides to provide plants having improved yield resulting from improved utilization of key biochemical compounds, such as nitrogen, phosphorous and carbohydrate, or resulting from improved responses to environmental stresses, such as cold, heat, drought, salt, and attack by pests or pathogens. Polynucleotides of the present invention may also be used to provide plants having improved growth and development, and ultimately increased yield, as the result of modified expression of plant growth regulators or modification of cell cycle or photosynthesis pathways. Other traits of interest that may be modified in plants using polynucleotides of the present invention include shade avoidance, flavonoid content, seed oil and protein quantity and quality, herbicide tolerance and rate of homologous recombination. Such improved properties and polynucleotides useful to obtain such properties are set forth in more detail herein, for example in section D and Table 1.

[0020] Thus, the present invention also comprises a transformed plant comprising a recombinant construct of the present invention. Of particular interest in the present invention are transformed maize and soybean plants.

[0021] The present invention provides a method of producing a plant having an improved property, wherein the method comprises transforming a plant with a recombinant construct comprising a promoter region functional in a plant cell operably joined to a polynucleotide comprising coding sequence for a polypeptide associated with said property, and growing said transformed plant. Desired properties and the polynucleotides useful to obtain such properties are described in detail herein. The polypeptides useful for providing improved properties may be polypeptides whose sequences are provided herein, or functional homologs of such polypeptides.

[0022] In the methods of the present the polynucleotide may be oriented with respect to the promoter such that transcription of the polynucleotide produces an mRNA encoding the polypeptide, and wherein the mRNA is translated to express the polypeptide in the plant. Alternatively, the polynucleotide may be oriented with respect to the promoter such that transcription from the polynucleotide produces an RNA complementary to the mRNA encoding the polypeptide, and wherein the level of the polypeptide in the plant is decreased as the result of the presence of the complementary RNA. Expression of complementary RNA is of particular interest where the polynucleotide is native to the target plant host.

[0023] A further aspect of the present invention relates to the discovery that transformation by insertion into the corn genome of heterologous genes, wherein the transcription of said heterologous genes is not known to produce a phenotype in corn, can be used as a reliable generator of modification of the corn genome to produce unexpected yet desired phenotypes. Thus, this invention provides methods for introducing into a maize line an enhanced phenotype as compared to a phenotype in parental units of said maize line. The method comprises generating a population of transgenic plants comprising a variety of heterologous DNA for the transcription of which there is no known phenotype in maize. In one aspect of the invention the population is generated for a plurality of transgenic events for a plurality of unique transgenic DNA constructs. Each transgenic event comprises introducing into the genome of a parental units a single transgenic DNA construct comprising a promoter operably linked to heterologous DNA for the transcription of which there is no known phenotype in corn. The transgenic DNA construct is introduced into the parental genome in sufficient quantity to produce transgenic cells which can be cultured into plants of transgenic maize having said enhanced phenotype. The transgenic cells are cultured into transgenic plants producing progeny transgenic seed. The population of transgenic plants are screened for observable phenotypes. Seed is collected from transgenic plants which are selected as having an unexpected enhanced phenotype. Optionally, the method comprises repeating a cycle of germinating transgenic seed, growing subsequent generation plants from said transgenic seed, observing phenotypes of said subsequent generation plants and collecting seeds from subsequent generation plants having an enhanced phenotype.

[0024] In preferred aspects of the method a large population is screened by generating at least 2 transgenic events for at least 20 unique transgenic DNA constructs, more preferably upwards of 10 or more transgenic events, say up to 100 or more transgenic events or upwards of 50 or more unique transgenic DNA constructs, say 100 or more or even 500 or more unique transgenic constructs.

[0025] Other preferred aspects of the method employ DNA constructs where the heterologous DNA is operably linked to a selected promoter, e.g. a promoter region comprising a rice actin promoter and rice actin intron. The DNA construct may be introduced into a random location in the genome or into a preselected site in the genome.

[0026] Yet another aspect of the invention provides a method comprising crossing transgenic plants from the population of transgenic plants with at least one other maize line to produce a hybrid population of transgenic plants, observing phenotypes in the hybrid population and selecting seed from transgenic plants having unexpected enhanced phenotypes in the hybrid population.

### BRIEF DESCRIPTION OF THE DRAWINGS

[0027] FIG. 1: Map of plasmid pMON64154. The plasmid comprises a 9215 base pair sequence comprising an nptII expression cassette and a GATEWAY™ cloning site (Invitrogen, Carlsbad, Calif.) flanked at the 5′ end by a rice actin 1 promoter, actin1 exon1, and actin1 intron 1 sequence and at the 3′ end by an Agrobacterium tumefaciens nopaline synthase-potato proteinase inhibitor II (pinII) 3′UTR.

[0028] FIG. 2: Map of plasmid pMON72472. The plasmid comprises a 9708 base pair sequence comprising an nptII expression cassette and a GATEWAY™ cloning site (Invitrogen, Carlsbad, Calif.) flanked at the 5′ end by a rice actin 1 promoter, actin1 exon1, and actin1 intron 1 sequence and at the 3′ end by an Agrobacterium tumefaciens nopaline synthase-potato proteinase inhibitor II (pinII) 3′UTR. The GATEWAY cloning and nptII cassettesa are flanked by the Agrobacterium tumefaciens left border and right border sequences.

### DETAILED DESCRIPTION OF THE INVENTION

[0029] Following are definitions for terms as specifically used herein.

[0030] “Heterologous” refers to a segment of DNA that is present in a non-natural DNA construct, e.g. regulatory DNA as well as DNA coding for a protein.

[0031] “Transgenic DNA construct” means a segment of DNA which is introduced into the genome of a parental maize line. While a transgenic DNA construct can comprise any segment of DNA that is heterologous to the insertion site, in preferred aspects of the invention the transgenic DNA construct will be designed to provide a specific function, e.g. suppress or over express a selected protein. Useful transgenic DNA constructs comprise gene regulatory segment operably linked to a protein coding segment. A gene regulatory segment can more specifically comprise promoter elements, enhancers, silencers, introns and untranslated regions. An especially useful gene regulatory segment for use in maize comprises a rice actin promoter with a rice actin intron as described more specifically below. Protein coding segment can be any coding segment that may be of interest for investigation into its effect in a transgenic plant. Exemplary protein coding segments include DNA segments encoding all or a part of any protein such as a cytochrome p450, a transporter, a lipase, a kinase, a receiver domain, a synthase, a transcription factor, a reductase, a phosphatase, a ribonuclease, an anhydrase and the like.

[0032] A “non-predetermined location in genomic DNA” means a random locus in a maize chromosome in which a transgenic DNA construct is inserted by chance.

[0033] “Transformation” means a method of introducing a transgenic DNA construct into a genome and can include any of the well-known and demonstrated methods including electroporation as illustrated in U.S. Pat. No. 5,384,253, microprojectile bombardment as illustrated in U.S. Pat. Nos. 5,015,580; 5,550,318; 5,538,880; 6,160,208; 6,399,861 and 6,403,865, Agrobacterium mediated transformation as illustrated in U.S. Pat. Nos. 5,635,055; 5,824,877; 5,591,616; 5,981,840 and 6,384,301, and protoplast transformation as illustrated in U.S. Pat. No. 5,508,184, all of which are incorporated herein by reference.

[0034] “Tissue from a parental maize line” means tissue which is specifically adapted for a selected method of transformation and can include cell culture or embryonic callus.

[0035] “Yield” as used herein means the production of shelled corn kernels per unit of production area, e.g. in bushels per acre or metric tons per hectare, often reported on a moisture adjusted basis, e.g. at 15.5% moisture. As a bushel of corn is defined by law in the State of Iowa as 56 pounds by weight, a useful conversion factor for corn yield is: 100 bushels per acre is equivalent to 6.272 metric tons per hectare.

[0036] A. Nucleic Acids

[0037] Nucleic acid molecules of the present invention are capable of specifically hybridizing to other nucleic acid molecules under certain circumstances. As used herein, two nucleic acid molecules are said to be capable of specifically hybridizing to one another if the two molecules are capable of forming an anti-parallel, double-stranded nucleic acid structure. A nucleic acid molecule is said to be the “complement” of another nucleic acid molecule if they exhibit complete complementarity. As used herein, molecules are said to exhibit “complete complementarity” when every nucleotide of one of the molecules is complementary to a nucleotide of the other. Two molecules are said to be “minimally complementary” if they can hybridize to one another with sufficient stability to permit them to remain annealed to one another under at least conventional “low-stringency” conditions. Similarly, the molecules are said to be “complementary” if they can hybridize to one another with sufficient stability to permit them to remain annealed to one another under conventional “high-stringency” conditions. Conventional stringency conditions are described by Sambrook et al., Molecular Cloning, A Laboratory Manual, 2nd Ed., Cold Spring Harbor Press, Cold Spring Harbor, N.Y. (1989), and by Haynes et al., Nucleic Acid Hybridization, A Practical Approach, IRL Press, Washington, DC (1985). Departures from complete complementarity are therefore permissible, as long as such departures do not completely preclude the capacity of the molecules to form a double-stranded structure. Thus, in order for a nucleic acid molecule or fragment of a nucleic acid molecule to serve as a primer or probe it need only be sufficiently complementary in sequence to be able to form a stable double-stranded structure under the particular solvent and salt concentrations employed.

[0038] Appropriate stringency conditions which promote DNA hybridization are, for example, 6.0× sodium chloride/sodium citrate (SSC) at about 45° C., followed by a wash of 2.0×SSC at 50° C., are known to those skilled in the art or can be found in Current Protocols in Molecular Biology, John Wiley & Sons, N.Y. (1989), 6.3.1-6.3.6. For example, the salt concentration in the wash step can be selected from a low stringency of about 2.0×SSC at 50 ° C. to moderately stringent conditions of about 2.0×SSC at 40 ° C. to high stringency conditions of about 0.2×SSC at 50° C.

[0039] As used herein “sequence identity” refers to the extent to which two optimally aligned polynucleotide or peptide sequences are invariant throughout a window of alignment of components, e.g. nucleotides or amino acids. An “identity fraction” for aligned segments of a test sequence and a reference sequence is the number of identical components which are shared by the two aligned sequences divided by the total number of components in reference sequence segment, i.e. the entire reference sequence or a smaller defined part of the reference sequence. “Percent identity” is the identity fraction times 100.

[0040] This invention provides nucleic acid molecules comprising DNA sequence representing genes or fragments of genes such as substantial parts of genes providing the protein coding sequence part of the gene. More specifically the nucleic acid molecules of this invention comprise nucleic acid molecules provided herein as SEQ ID NO: 1 through SEQ ID NO: 368.

[0041] A subset of the nucleic acid molecules of the present invention includes nucleic acid molecules that are marker molecules. Another subset of the nucleic molecules of this invention includes fragments of genes consisting of oligonucleotides of at least 15, preferably at least 16 or 17, more preferably at least 18 or 19, and even more preferably at least 20 or more, consecutive nucleotides. Such oligonucleotides are fragments of the larger molecules having a sequence selected from the group consisting of SEQ ID NO: 1 through SEQ ID NO: 368.

[0042] Nucleic acid molecules of the invention may encode significant portions of, or indeed most if not all of, the protein encoded by the corresponding gene.

[0043] Nucleic acid sequences can be screened for the presence of protein encoding sequence which is homologous to genes of other organisms with known protein encoding sequence using any of a variety of search algorithms. Such search algorithms can be homology-based or predictive-based. Homology-based searches (e.g., GAP2, BLASTX supplemented by NAP and TBLASTX) detect conserved sequences during comparisons of DNA sequences or hypothetically translated protein sequences to public and/or proprietary DNA and protein databases. Existence of a gene is inferred if significant sequence similarity extends over the majority of the target gene. Since homology-based methods may overlook genes unique to the source organism, for which homologous nucleic acid molecules have not yet been identified in databases, gene prediction programs are also used. Gene prediction programs generally use “signals” in the sequence, such as splice sites or “content” statistics, such as codon bias; to predict gene structures (Stormo, G., Genome Research 10: 394-397 (2000)).

[0044] With respect to nucleotide sequences, degeneracy of the genetic code provides the possibility to substitute at least one base of the base sequence of a gene with a different base without causing the amino acid sequence of the polypeptide produced from the gene to be changed. Hence, the DNA of the present invention may also have any base sequence that has been changed from SEQ ID NO: 1 to SEQ ID NO: 368 by substitution in accordance with degeneracy of genetic code. References describing codon usage include: Carels et al., J. Mol. Evol. 46: 45 (1998) and Fennoy et al., Nucl. Acids Res. 21 (23): 5294 (1993).

[0045] B. Protein and Polypeptide Molecules

[0046] This invention also provides protein and polypeptide molecules, including those encoded by nucleic acid molecules of the present invention. Of particular interest, are polypeptides whose sequences are provided herein as SEQ ID NO: 369 through SEQ ID NO: 736. As used herein, the terms “protein” and “polypeptide” include any molecule that comprises five or more amino acids. It is well known in the art that proteins and polypeptides may undergo modification, including post-translational modifications, such as, but not limited to, disulfide bond formation, glycosylation, phosphorylation, or oligomerization. Thus, the “proteins” and “polypeptides” of this invention include molecules that are modified by any biological or non-biological process. The terms “amino acid” and “amino acids” refer to all naturally occurring L-amino acids. This definition is meant to include norleucine, ornithine, homocysteine, and homoserine.

[0047] A further aspect of the invention comprises polypeptides which differ in one or more amino acids from those of a protein sequence provided herein as the result of one or more conservative amino acid substitutions, deletions or insertions, but having the same function as a polypeptide provided herein. Such functional homologs are also of interest in the present invention and find use in methods of producing plants having improved properties.

[0048] It is well known in the art that one or more amino acids in a native sequence can be substituted with another amino acid(s), the charge and polarity of which are similar to that of the native amino acid, resulting in a silent change. For instance, valine is a conservative substitute of alanine and threonine is a conservative substitute for serine. Conservative substitutions for an amino acid within the native polypeptide sequence can be selected from other members of the class to which the naturally occurring amino acid belongs. Amino acids can be divided into the following four groups: (1) acidic amino acids, (2) basic amino acids, (3) neutral polar amino acids, and (4) neutral nonpolar amino acids. Representative amino acids within these various groups include, but are not limited to: (1) acidic (negatively charged) amino acids such as aspartic acid and glutamic acid; (2) basic (positively charged) amino acids such as arginine, histidine, and lysine; (3) neutral polar amino acids such as glycine, serine, threonine, cysteine, cystine, tyrosine, asparagine, and glutamine; and (4) neutral nonpolar (hydrophobic) amino acids such as alanine, leucine, isoleucine, valine, proline, phenylalanine, tryptophan, and methionine. Conserved substitutes for an amino acid within a native amino acid sequence can be selected from other members of the group to which the naturally occurring amino acid belongs. For example, a group of amino acids having aliphatic side chains is glycine, alanine, valine, leucine, and isoleucine; a group of amino acids having aliphatic-hydroxyl side chains is serine and threonine; a group of amino acids having amide-containing side chains is asparagine and glutamine; a group of amino acids having aromatic side chains is phenylalanine, tyrosine, and tryptophan; a group of amino acids having basic side chains is lysine, arginine, and histidine; and a group of amino acids having sulfur-containing side chains is cysteine and methionine. Naturally conservative amino acids substitution groups are: valine-leucine, valine-isoleucine, phenylalanine-tyrosine, lysine-arginine, alanine-valine, aspartic acid-glutamic acid, and asparagine-glutamine.

[0049] Also of interest are polypeptides which have the same function as polypeptides of this invention and a modified activity. Variations in protein activity can be achieved by mutagenesis; screening methods for obtaining a specified protein or enzymatic activity of interest are disclosed in U.S. Pat. No. 5,939,250. An alternative approach to the generation of variants uses random recombination techniques such as “DNA shuffling” as disclosed in U.S. Pat. Nos. 5,605,793; 5,811,238; 5,830,721; 5,837,458 and International Applications WO 98/31837, WO 99/65927. An alternative method of molecular evolution involves a staggered extension process (StEP) for in vitro mutagenesis and recombination of nucleic acid molecule sequences, as disclosed in U.S. Pat. No. 5,965,408 and International Application WO 98/42832.

[0050] C. Plant Transformation Constructs

[0051] Nucleic acid molecules of the present invention may be used in transformation, e.g. where exogenous genetic material may be transferred into a plant cell and the plant cell regenerated into a whole plant. As used herein, an “exogenous coding region” or “selected coding region” is a coding region not normally found in the host genome in an identical context. By this, it is meant that the coding region may be isolated from a different species than that of the host genome, or alternatively, isolated from the host genome, but is operably linked to one or more regulatory regions which differ from those found in the unaltered, native gene. An exogenous nucleic acid molecule can have a naturally occurring or non-naturally occurring nucleotide sequence. One skilled in the art understands that an exogenous nucleic acid molecule can be a nucleic acid molecule derived from a different or the same species into which it is introduced. Such exogenous genetic material may be transferred into either monocotyledons and dicotyledons including but not limited to the plants, soy, cotton, canola, maize, wheat and rice.

[0052] Exogenous genetic material may be transferred into a plant cell by the use of a DNA vector or construct designed for such a purpose. Preferred exogenous genetic material comprise a nucleic acid molecule of the present invention. Vectors have been engineered for transformation of constructs comprising one or more nucleic acid molecules into plant genomes. Vectors have been designed to replicate in both E. coli and A. tumefaciens and have all of the features required for transferring large inserts of DNA into plant chromosomes. Exogenous genetic material may be transferred into a host cell by the use of a DNA vector or construct designed for such a purpose.

[0053] An important aspect of the present invention is the introduction into plants of a gene provided herein to affect the expression of a particular protein or polypeptide product. The design and construction of vectors which may be employed in conjunction with plant transformation techniques according to the present invention will be known to those of skill of the art in light of the present disclosure (see for example, Sambrook et al., 1989; Gelvin et al., 1994; Clark 1997). The techniques of the current invention are thus not limited to any particular DNA, and may be used to introduce one or more desirable genes into a plant, the expression of which will confer a desirable phenotype on a plant.

[0054] In cases where over expression of heterologous DNA may not be satisfactory, effective or desirable in producing an observed enhanced phenotype, it is contemplated that a person or ordinary skill in the art would look to protein pathways for an alternate route to the desired enhanced phenotype. Such alternate route may include insertion of heterologous DNA coding for a protein which is upstream or downstream of the protein originally associated with the observed enhanced phenotype. Another alternate route may include insertion of heterologous DNA which is effective in suppression of a competitive protein. When suppression of protein expression is the intended objective, the heterologous DNA can be designed to produce a gene silencing effect, e.g. by an antisense or RNAi mechanism. Anti-sense suppression of genes in plants by introducing by transformation of a construct comprising DNA of the gene of interest in an anti-sense orientation is disclosed in U.S. Pat. Nos. 5,107,065; 5,453,566; 5,759,829; 5,874,269; 5,922,602; 5,973,226; 6,005,167; WO 99/32619; WO 99/61631; WO 00/49035; WO 02/02798; all of which are incorporated herein by reference. Interfering RNA suppression of genes in a plant by introducing by transformation of a construct comprising DNA encoding a small (commonly less than 30 base pairs) double-stranded piece of RNA matching the RNA encoded by the gene of interest is disclosed in U.S. Pat. Nos. 5,190,931; 5,272,065; 5,268,149; WO 99/61631; WO 01/75164; WO 01/92513, all of which are incorporated herein by reference.

[0055] GATEWAY™ cloning technology (Invitrogen Life Technologies, Carlsbad, Calif.) is preferably used for construction of vectors. GATEWAY™ technology uses phage lambda base site-specific recombination for vector construction, instead of restriction endonucleases and ligases. The GATEWAY™ method produces a high frequency of inserts in a plasmid in the correct orientation relative to other elements in the plasmid such as promoters, enhancers, and the such. Routine cloning of any desired DNA sequence into a vector comprising operable plant expression elements is thereby facilitated. Using the GATEWAY™ cloning technology, a desired DNA sequence, such as a coding sequence, may be amplified by PCR with the phage lambda attB1 sequence added to the 5′ primer and the attB2 sequence added to the 3′ primer. Alternatively, nested primers comprising a set of attB1 and attB2 specific primers and a second set of primers specific for the selected DNA sequence can be used. Sequences, such as coding sequences, flanked by attB1 and attB2 sequences can be readily inserted into plant expression vectors using GATEWAY™ methods.

[0056] In certain embodiments, the present inventors contemplate the transformation of a recipient cell with more than one transformation construct. For example, a gene of interest for plant improvement may be employed in combination with a marker gene. One may employ the separate genes on either the same or different DNA segments for transformation. In the latter case, the different vectors may be delivered concurrently to recipient cells if cotransformation into a single chromosomal location is desired. Using microprojectile bombardment and Agrobacterium mediated transformation, a certain percentage of cells in which the marker has been introduced will also receive the other gene(s) of interest, and the selectable marker and gene(s) of interest will be cointegrated at a single locus in the host genome. Two or more transgenes can also be introduced in a single transformation event using either distinct selected-protein encoding vectors, or using a single vector incorporating two or more gene coding sequences. Of course, any two or more transgenes of any description, such as those conferring, for example, herbicide, insect, disease (viral, bacterial, fungal, nematode) or drought resistance, male sterility, drydown, standability, prolificacy, starch quantity or properties, oil quantity and quality, or those increasing yield or nutritional quality may be employed as desired.

[0057] In other embodiments of the invention, it is contemplated that one may wish to employ replication-competent viral vectors for plant transformation. Such vectors include, for example, wheat dwarf virus (WDV) “shuttle” vectors, such as pW1-11 and pW1-GUS (Ugaki et al., 1991). These vectors are capable of autonomous replication in maize cells as well as E. coli, and as such may provide increased sensitivity for detecting DNA delivered to transgenic cells. A replicating vector also may be useful for delivery of genes flanked by DNA sequences from transposable elements such as Ac/Ds, or Mu. It has been proposed that transposition of these elements within the maize genome requires DNA replication (Laufs et al., 1990). It also is contemplated that transposable elements would be useful for producing transgenic plants lacking elements necessary for selection and maintenance of the plasmid vector in bacteria, e.g. antibiotic resistance genes, or other selectable markers, and origins of DNA replication. It also is proposed that use of a transposable element such as Ac, Ds, or Mu would actively promote integration of the desired DNA and hence increase the frequency of stably transformed cells.

[0058] Vectors used for plant transformation may include, for example, plasmids, cosmids, YACs (yeast artificial chromosomes), BACs (bacterial artificial chromosomes), PACs (plant artificial chromosomes), or any other suitable cloning system. It is contemplated that utilization of cloning systems with large insert capacities will allow introduction of large DNA sequences comprising more than one selected gene. Introduction of such sequences may be facilitated by use of bacterial or yeast artificial chromosomes (BACs or YACs, respectively), or even plant artificial chromosomes (PACs). For example, the use of BACs for Agrobacterium-mediated transformation was disclosed by Hamilton et al. (1996).

[0059] Particularly useful for transformation are expression cassettes which have been isolated from such vectors. DNA segments used for transforming plant cells will, of course, generally comprise the cDNA, gene or genes which one desires to introduced into and have expressed in the host cells. These DNA segments can further include structures such as promoters, enhancers, 3′ untranslated regions (such as polyadenylation sites), polylinkers, or even regulatory genes as desired. The DNA segment or gene chosen for cellular introduction may encode a protein which will be expressed in the resultant recombinant cells resulting in a screenable or selectable trait and/or which will impart an improved phenotype to the resulting transgenic plant. However, this may not always be the case, and the present invention also encompasses transgenic plants incorporating non-expressed transgenes. Preferred components likely to be included with vectors used in the current invention are as follows.

[0060] 1. Regulatory Elements

[0061] A number of promoters that are active in plant cells have been described in the literature. Such promoters would include but are not limited to the nopaline synthase (NOS) and octopine synthase (OCS) promoters that are carried on tumor-inducing plasmids of Agrobacterium tumefaciens, the caulimovirus promoters such as the cauliflower mosaic virus (CaMV) 19S and 35S promoters and the figwort mosaic virus (FMV) 35S promoter, the enhanced CaMV35S promoter (e35S), the light-inducible promoter from the small subunit of ribulose bisphosphate carboxylase (ssRUBISCO, a very abundant plant polypeptide). It is particularly contemplated that the rice actin 1 promoter will be useful in the practice of the present invention. All of these promoters have been used to create various types of DNA constructs that have been expressed in plants. See, for example PCT publication WO 84/02913 (Rogers et al., Monsanto, herein incorporated by reference in its entirety).

[0062] Promoter hybrids can also be constructed to enhance transcriptional activity (Hoffman, U.S. Pat. No. 5,106,739), or to combine desired transcriptional activity, inducibility and tissue specificity or developmental specificity. Promoters that function in plants include but are not limited to promoters that are inducible, viral, synthetic, constitutive as described (Poszkowski et al., 1989; Odell et al., 1985), and temporally regulated, spatially regulated, and spatio-temporally regulated (Chau et al., 1989). Other promoters that are tissue-enhanced, tissue-specific, or developmentally regulated are also known in the art and envisioned to have utility in the practice of this invention.

[0063] Promoters may be obtained from a variety of sources such as plants and plant DNA viruses and include, but are not limited to the CaMV35S and FMV35S promoters and promoters isolated from plant genes such as ssRUBISCO genes. As described below, it is preferred that the particular promoter selected should be capable of causing sufficient expression to result in the production of an effective amount of the gene product of interest.

[0064] The promoters used in the DNA constructs (i.e. chimeric/recombinant plant genes) of the present invention may be modified, if desired, to affect their control characteristics. Promoters can be derived by means of ligation with operator regions, random or controlled mutagenesis, etc. Furthermore, the promoters may be altered to contain multiple “enhancer sequences” to assist in elevating gene expression. Examples of such enhancer sequences have been reported by Kay et al. (1987).

[0065] By including an enhancer sequence with such constructs, the expression of the selected protein may be enhanced. These enhancers often are found 5′ to the start of transcription in a promoter that functions in eukaryotic cells, but can often be inserted in the forward or reverse orientation 5′ or 3′ to the coding sequence. In some instances, these 5′ enhancing elements are introns. Deemed to be particularly useful as enhancers are the 5′ introns of the rice actin 1 and rice actin 2 genes. Examples of other enhancers which could be used in accordance with the invention include elements from the CaMV 35S promoter, octopine synthase genes (Ellis et al., 1987), the maize alcohol dehydrogenase gene, the maize shrunken 1 gene and promoters from non-plant eukaryotes (e.g., yeast; Ma et al., 1988).

[0066] Where an enhancer is used in conjunction with a promoter for the expression of a selected protein, it is believed that it will be preferred to place the enhancer between the promoter and the start codon of the selected coding region. However, one also could use a different arrangement of the enhancer relative to other sequences and still realize the beneficial properties conferred by the enhancer. For example, the enhancer could be placed 5′ of the promoter region, within the promoter region, within the coding sequence (including within any other intron sequences which may be present), or 3′ of the coding region.

[0067] In addition to introns with enhancing activity, other types of elements can influence gene expression. For example, untranslated leader sequences predicted to enhance gene expression as well as “consensus” and preferred leader sequences have been identified (Joshi, 1987). Preferred leader sequences are contemplated to include those which have sequences predicted to direct optimum expression of the attached coding region, i.e., to include a preferred consensus leader sequence which may increase or maintain mRNA stability and prevent inappropriate initiation of translation. The choice of such sequences will be known to those of skill in the art in light of the present disclosure. Sequences that are derived from genes that are highly expressed in plants, and in maize in particular, will be most preferred, for example, sequences derived from the small subunit of ribulose bisphosphate carboxylase (RUBISCO).

[0068] It also is contemplated that expression of one or more transgenes may be eliminated upon expression of a transgene. In particular, by operably linking a promoter to a particular coding sequence in antisense orientation, accumulation of the respective protein encoded by the sense transcript could be eliminated or decreased. This could allow, for example, elimination of a particular gene product which would contribute to the adverse effects of osmotic stress or attack by pests, disease, or other conditions.

[0069] It also is contemplated that it may be useful to target DNA within a cell. For example, it may be useful to target introduced DNA to the nucleus as this may increase the frequency of transformation. Particular DNA sequences which are capable of targeting DNA to the nucleus are known, e.g., the Agrobacterium tumefaciens virD2 gene (Tinland et al., 1995). Within the nucleus itself, it would be useful to target a gene in order to achieve site specific integration. For example, it would be useful to have a gene introduced through transformation replace an existing gene in the cell. Furthermore, it would be useful to target a transgene to integrate into the genome at a predetermined site from which it is known that gene expression occurs. Several site specific recombination systems exist which are known, including cre-lox (U.S. Pat. No. 4,959,317) and FLP-FRT (U.S. Pat. No. 5,527,695). Both of these cited site specific recombination systems have been shown to function in plants (Albert et al., 1995; Lyznik et al., 1996).

[0070] 2. 3′ Untranslated Regions (3′ UTR)

[0071] Transformation constructs prepared in accordance with the invention will typically include a 3′ end untranlated sequence DNA sequence that follows the coding sequence and typically contains a polyadenylation sequence. One type of 3′ untranslated sequence which may be used is a 3′ UTR from the nopaline synthase gene of Agrobacterium tumefaciens (nos 3′ end; Bevan et al., 1983). Where a 3′ end other than a nos 3′ UTR is used in accordance with the invention, the most preferred 3′ ends are contemplated to be those from a gene encoding the small subunit of a ribulose-1,5-bisphosphate carboxylase-oxygenase (rbcS), and more specifically, from a rice rbcS gene (PCT Publication WO 00/70066), the 3′ UTR for the T7 transcript of Agrobacterium tumefaciens (Dhaese et al., 1983), the 3′ end of the protease inhibitor I or II genes from potato (An et al., 1989) or tomato (Pearce et al., 1991), and the 3′ region isolated from Cauliflower Mosaic Virus (Timmermans et al., 1990). Alternatively, one also could use a gamma coixin, oleosin 3 or other 3′ UTRs from the genus Coix (PCT Publication WO 99/58659).

[0072] 3. Transit or Signal Peptides

[0073] Sequences that are joined to the coding sequence of an expressed gene, which are removed post-translationally from the initial translation product and which facilitate the transport of the protein into or through intracellular or extracellular membranes, are termed transit sequences (usually into vacuoles, vesicles, plastids and other intracellular organelles) and signal sequences (usually to the endoplasmic reticulum, golgi apparatus, peroxisomes or glyoxysomes, and outside of the cellular membrane). By facilitating the transport of the protein into compartments inside and outside the cell, these sequences may increase the accumulation of a gene product protecting the protein from intracellular proteolytic degradation. These sequences also allow for additional mRNA sequences from highly expressed genes to be attached to the coding sequence of the genes. Since mRNA being translated by ribosomes is more stable than naked mRNA, the presence of translatable mRNA 5′ of the gene of interest may increase the overall stability of the mRNA transcript from the gene and thereby increase synthesis of the gene product. Since transit and signal sequences are usually post-translationally removed from the initial translation product, the use of these sequences allows for the addition of extra translated sequences that may not appear on the final polypeptide. It further is contemplated that targeting of certain proteins may be desirable in order to enhance the stability of the protein (U.S. Pat. No. 5,545,818, incorporated herein by reference in its entirety).

[0074] A particular example of such a use concerns the direction of a protein conferring herbicide resistance, such as a glyphosate resistant EPSPS protein, to a particular organelle such as the chloroplast, rather than to the cytoplasm. This is exemplified by the use of the rbcS transit peptide, the chloroplast transit peptide described in U.S. Pat. No. 5,728,925, or the optimized transit peptide described in U.S. Pat. No. 5,510,471, which confer plastid-specific targeting of proteins. In addition, it may be desirable to target certain genes responsible for male sterility to the mitochondria, or to target certain genes for resistance to phytopathogenic organisms to the extracellular spaces, or to target proteins to the vacuole. A further use concerns the direction of enzymes involved in amino acid biosynthesis or oil synthesis to the plastid. Such enzymes include dihydrodipicolinic acid synthase which may contribute to increasing the lysine content of a seed.

[0075] Additionally, vectors may be constructed and employed in the intracellular targeting of a specific gene product within the cells of a transgenic plant or in directing a protein to the extracellular environment. This generally will be achieved by joining a DNA sequence encoding a transit or signal peptide sequence to the coding sequence of a particular gene. An intracellular targeting DNA sequence may be operably linked 5′ or 3′ to the coding sequence depending on the particular targeting sequence. The resultant transit, or signal, peptide will transport the protein to a particular intracellular, or extracellular destination, respectively, and will then be post-translationally removed.

[0076] 4. Marker Genes

[0077] Characteristics useful for selectable markers in plants have been outlined in a report on the use of microorganisms (Advisory Committee on Novel Foods and Processes, July 1994). These include:

[0078] (i) stringent selection with minimum number of nontransformed tissues;

[0079] (ii) large numbers of independent transformation events with no significant interference with regeneration of plants;

[0080] (iii) application to a large number of species; and

[0081] (iv) availability of an assay to score the tissues for presence of the marker.

[0082] As mentioned, several antibiotic resistance markers satisfy these criteria, including those conferring resistance to kanamycin (nptII), hygromycin B (aph IV) and gentamycin (aac3 and aacC4) as well as herbicides such as glufosinate (bar orpat) and glyphosate (EPSPS).

[0083] A number of selectable marker genes are known in the art and can be used in the present invention (see for example Wilmink and Dons, 1993). Particularly preferred selectable marker genes for use in the present invention would include genes that confer resistance to compounds such as antibiotics like kanamycin (Dekeyser et al., 1989), and herbicides like glyphosate (Della-Cioppa et al., 1987). Other selection devices can also be implemented including but not limited to tolerance to phosphinothricin, bialaphos, and positive selection mechanisms (Joersbo et al., 1998) and would still fall within the scope of the present invention.

[0084] By employing a selectable or screenable marker gene as, or in addition to, the gene of interest, one can provide or enhance the ability to identify transformants. “Marker genes” are genes that impart a distinct phenotype to cells expressing the marker gene and thus allow such transformed cells to be distinguished from cells that do not have the marker. Such genes may encode either a selectable or screenable marker, depending on whether the marker confers a trait which one can “select” for by chemical means, i.e., through the use of a selective agent (e.g., a herbicide, antibiotic, or the like), or whether it is simply a trait that one can identify through observation or testing, i.e., by “screening”′ (e.g., the green fluorescent protein). Of course, many examples of suitable marker genes are known to the art and can be employed in the practice of the invention.

[0085] Included within the terms selectable or screenable marker genes also are genes which encode a “secretable marker” whose secretion can be detected as a means of identifying or selecting for transformed cells. Examples include marker genes which encode a secretable antigen that can be identified by antibody interaction, or even secretable enzymes which can be detected by their catalytic activity. Secretable proteins fall into a number of classes, including small, diffusible proteins detectable, e.g., by ELISA; small active enzymes detectable in extracellular solution (e.g., α-amylase, β-lactamase, phosphinothricin acetyltransferase); and proteins that are inserted or trapped in the cell wall (e.g., proteins that include a leader sequence such as that found in the expression unit of extensin or tobacco PR—S).

[0086] With regard to selectable secretable markers, the use of a gene that encodes a protein that becomes sequestered in the cell wall, and which protein includes a unique epitope is considered to be particularly advantageous. Such a secreted antigen marker would ideally employ an epitope sequence that would provide low background in plant tissue, a promoter-leader sequence that would impart efficient expression and targeting across the plasma membrane, and would produce protein that is bound in the cell wall and yet accessible to antibodies. A normally secreted wall protein modified to include a unique epitope would satisfy all such requirements.

[0087] a. Selectable Markers

[0088] Many selectable marker coding regions may be used in connection with the present invention including, but not limited to, nptII (Potrykus et al., 1985) which provides kanamycin resistance and can be selected for using kanamycin, G418, paromomycin, etc.; bar, which confers bialaphos or phosphinothricin resistance; a glyphosate resistant EPSP synthase protein (Hinchee et al, 1988 U.S. Pat. No. 5,633,435) conferring glyphosate resistance; a nitrilase such as bxn from Klebsiella ozaenae which confers resistance to bromoxynil (Stalker et al., 1988); a mutant acetolactate synthase (ALS) which confers resistance to imidazolinone, sulfonylurea or other ALS inhibiting chemicals (EP 0 154 204); a methotrexate resistant DHFR (Thillet et al., 1988), a dalapon dehalogenase that confers resistance to the herbicide dalapon (U.S. Pat. No. 5,780,708); or a mutated anthranilate synthase that confers resistance to 5-methyl tryptophan or other anthranilate synthase inhibiting compounds (U.S. Pat. No. 6,118,047). The cloning of the bar gene has been described (Murakami et al., 1986; Thompson et al., 1987) as has the use of the bar gene in the context of U.S. Pat. No. 5,550,318).

[0089] b. Screenable Markers

[0090] Screenable markers that may be employed include a β-glucuronidase or uidA gene (Jefferson et al., 1986; the protein product is commonly referred to as GUS), isolated from E. coli, which encodes an enzyme for which various chromogenic substrates are known; an R-locus gene, which encodes a product that regulates the production of anthocyanin pigments (red color) in plant tissues (Dellaporta et al., 1988); a β-lactamase gene (Sutcliffe, 1978), which encodes an enzyme for which various chromogenic substrates are known (e.g., PADAC, a chromogenic cephalosporin); a xylE gene (Zukowsky et al., 1983) which encodes a catechol dioxygenase that can convert chromogenic catechols; an (x-amylase gene (Ikuta et al., 1990); a tyrosinase gene (Katz et al., 1983) which encodes an enzyme capable of oxidizing tyrosine to DOPA and dopaquinone which in turn condenses to form the easily-detectable compound melanin; β-galactosidase gene, which encodes an enzyme for which there are chromogenic substrates; a luciferase (lux) gene (Ow et al., 1986), which allows for bioluminescence detection; an aequorin gene (Prasher et al, 1985) which may be employed in calcium-sensitive bioluminescence detection; or a gene encoding for green fluorescent protein (Sheen et al., 1995; Haseloff et al., 1997; Reichel et al, 1996; Tian et al, 1997; PCT Publication WO 97/41228).

[0091] The R gene complex in maize encodes a protein that acts to regulate the production of anthocyanin pigments in most seed and plant tissue. Maize strains can have one, or as many as four, R alleles which combine to regulate pigmentation in a developmental and tissue specific manner. Thus, an R gene introduced into such cells will cause the expression of a red pigment and, if stably incorporated, can be visually scored as a red sector. If a maize line carries dominant alleles for genes encoding for the enzymatic intermediates in the anthocyanin biosynthetic pathway (C2, A1, A2, Bz1 and Bz2), but carries a recessive allele at the R locus, transformation of any cell from that line with R will result in red pigment formation. Exemplary lines include Wisconsin 22 which contains the rg-Stadler allele and TR112, a K55 derivative which has the genotype r-g, b, P1. Alternatively, any genotype of maize can be utilized if the C1 and R alleles are introduced together.

[0092] It further is proposed that R gene regulatory regions may be employed in chimeric constructs in order to provide mechanisms for controlling the expression of chimeric genes. More diversity of phenotypic expression is known at the R locus than at any other locus (Coe et al., 1988). It is contemplated that regulatory regions obtained from regions 5′ to the structural R gene would be valuable in directing the expression of genes for, e.g., insect resistance, herbicide tolerance or other protein coding regions. For the purposes of the present invention, it is believed that any of the various R gene family members may be successfully employed (e.g., P, S, Lc, etc). However, the most preferred will generally be Sn (particularly Sn:bol3). Sn is a dominant member of the R gene complex and is functionally similar to the R and B loci in that Sn controls the tissue specific deposition of anthocyanin pigments in certain seedling and plant cells, therefore, it's phenotype is similar to R.

[0093] Other screenable markers provide for visible light emission as a screenable phenotype. A screenable marker contemplated for use in the present invention is firefly luciferase, encoded by the lux gene. The presence of the lux gene in transformed cells may be detected using, for example, X-ray film, scintillation counting, fluorescent spectrophotometry, low-light video cameras, photon counting cameras or multiwell luminometry. It also is envisioned that this system may be developed for populational screening for bioluminescence, such as on tissue culture plates, or even for whole plant screening. The gene which encodes green fluorescent protein (GFP) is contemplated as a particularly useful reporter gene (Sheen et al., 1995; Haseloff et al., 1997; Reichel et al., 1996; Tian et al., 1997; PCT Publication WO 97/41228). Expression of green fluorescent protein may be visualized in a cell or plant as fluorescence following illumination by particular wavelengths of light. Where use of a screenable marker gene such as lux or GFP is desired, the inventors contemplated that benefit may be realized by creating a gene fusion between the screenable marker gene and a selectable marker gene, for example, a GFP-NPTII gene fusion (PCT Publication WO 99/60129). This could allow, for example, selection of transformed cells followed by screening of transgenic plants or seeds. In a similar manner, it is possible to utilize other readily available fluorescent proteins such as red fluorescent protein (CLONTECH, Palo Alto, Calif.).

[0094] Exogenous Genes for Modification of Plant Phenotypes

[0095] A particularly important advance of the present invention is that it provides DNA sequences useful for producing desirable phenotypes in plants, preferably crop plants such as soybean, cotton, canola, sunflower and wheat, and most preferably in maize.

[0096] The choice of a selected gene for expression in a plant host cell in accordance with the invention will depend on the purpose of gene expression. One of the major purposes of transformation of crop plants is to add commercially desirable, agronomically important or end-product traits to the plant. Such traits include, but are not limited to, herbicide resistance or tolerance, insect resistance or tolerance, disease resistance or tolerance (viral, bacterial, fungal, nematode), stress tolerance and/or resistance, as exemplified by resistance or tolerance to drought, heat, chilling, freezing, excessive moisture, salt stress and oxidative stress, increased yield, food or feed content and value, physical appearance, male sterility, drydown, standability, prolificacy, starch quantity and quality, oil quantity and quality, protein quality and quantity, amino acid composition, and the like. The present invention provides various strategies for crop improvement and genes associated with the strategies. The genes and strategies are listed in Table 1 below and described in more detail herein.

TABLE 1

| | | PEP | | | | |
|---|---|---|---|---|---|---|
| SEQ | | SEQ | | | | |
| ID | | ID | | DONOR | CODING | |
| NO | PHE_ID | NO | GENE NAME | ORGANISM | SEQUENCE | STRATEGY |
| 1 | PHE0000022 | 369 | Zm AAP6 | Zea mays | 96-1547 | Amino acid transporters |
| 2 | PHE0000023 | 370 | Os ProT | Oryza sativa | 144-1562 | Amino acid transporters |
| 3 | PHE0000279 | 371 | sorghum proline | Sorghum | 16-1341 | Amino acid transporters |
| | | | permease | bicolor | | |
| 4 | PHE0000280 | 372 | rice AA transporter | Oryza sativa | 61-1485 | Amino acid transporters |
| 5 | PHE0000281 | 373 | K/H specific amino | Zea mays | 63-1427 | Amino acid transporters |
| | | | acid permease | | | |
| 6 | PHE0000402 | 374 | rice amino acid | Oryza sativa | 89-1426 | Amino acid transporters |
| | | | transporter-like | | | |
| | | | protein | | | |
| 7 | PHE0000403 | 375 | corn amino acid | Zea mays | 116-1453 | Amino acid transporters |
| | | | permease | | | |
| 8 | PHE0000404 | 376 | rice proline transport | Oryza sativa | 313-1731 | Amino acid transporters |
| | | | protein | | | |
| 9 | PHE0000450 | 377 | rice amino acid | Oryza sativa | 110-1450 | Amino acid transporters |
| | | | permease | | | |
| 10 | PHE0000108 | 378 | ASH1 | Arabidopsis | 61-801 | Protection against |
| | | | | thaliana | | osmotic stress |
| 11 | PHE0000109 | 379 | rice ASH1-like1 | Oryza sativa | 136-1008 | Protection against |
| | | | | | | osmotic stress |
| 12 | PHE0000110 | 380 | rice MtN2-like | Oryza sativa | 425-464, 546-582, | Protection against |
| | | | | | 672-783, | osmotic stress |
| | | | | | 812-898, | |
| | | | | | 988-1149, | |
| | | | | | 1556-1675, | |
| | | | | | 1776-1952 | |
| 10 | PHE0000108 | 378 | 61-801 | ASH1 | Arabidopsis | Modification of sugar |
| | | | | | thaliana | transport and/or |
| | | | | | | metabolism |
| 11 | PHE0000109 | 379 | 136-1008 | rice ASH1- | Oryza sativa | Modification of sugar |
| | | | | like1 | | transport and/or |
| | | | | | | metabolism |
| 12 | PHE0000110 | 380 | 425-464, 546-582, | rice MtN2-like | Oryza sativa | Modification of sugar |
| | | | 672-783, 812-898, | | | transport and/or |
| | | | 988-1149, 1556-1675, | | | metabolism |
| | | | 1776-1952 | | | |
| 13 | PHE0000262 | 381 | cytochrome P450-like | Zea mays | 29-1495 | Plant steroid |
| | | | protein | | | biosynthesis pathway |
| | | | | | | and signal transduction |
| | | | | | | genes |
| 14 | PHE0000263 | 382 | cytochrome P450 | Zea mays | 141-1637 | Plant steroid |
| | | | | | | biosynthesis pathway |
| | | | | | | and signal transduction |
| | | | | | | genes |
| 15 | PHE0000264 | 383 | cytochrome P450-like | Zea mays | 104-1657 | Plant steroid |
| | | | | | | biosynthesis pathway |
| | | | | | | and signal transduction |
| | | | | | | genes |
| 16 | PHE0000265 | 384 | CYP90 protein | Zea mays | 81-1589 | Plant steroid |
| | | | | | | biosynthesis pathway |
| | | | | | | and signal transduction |
| | | | | | | genes |
| 17 | PHE0000266 | 385 | cytochrome P450 | Zea mays | 92-1648 | Plant steroid |
| | | | DWARF3 | | | biosynthesis pathway |
| | | | | | | and signal transduction |
| | | | | | | genes |
| 18 | PHE0000267 | 386 | cytochrome P450 | Zea mays | 134-1543 | Plant steroid |
| | | | | | | biosynthesis pathway |
| | | | | | | and signal transduction |
| | | | | | | genes |
| 19 | PHE0000268 | 387 | rice receptor protein | Oryza sativa | 183-476, 706-735, | Plant steroid |
| | | | kinase | | 2796-6734 | biosynthesis pathway |
| | | | | | | and signal transduction |
| | | | | | | genes |
| 20 | PHE0000084 | 388 | rice cyclin H | Oryza sativa | 235-1227 | Cyclin dependent kinase |
| | | | | | | activating kinase |
| 21 | PHE0000085 | 389 | rice cdc2+/CDC28- | Oryza sativa | 173-1447 | Cyclin dependent kinase |
| | | | related protein kinase | | | activating kinase |
| 22 | PHE0000086 | 390 | Cdk-activating kinase 1 | Glycine max | 14-1240 | Cyclin dependent kinase |
| | | | | | | activating kinase |
| 23 | PHE0000284 | 391 | menage a trois-like | Zea mays | 164-745 | Cyclin dependent kinase |
| | | | | | | activating kinase |
| 24 | PHE0000362 | 392 | CDC28-related | Zea mays | 198-1484 | Cyclin dependent kinase |
| | | | protein kinase | | | activating kinase |
| 25 | PHE0000083 | 393 | PDR5 | Saccharomyces | 1552-6087 | Cercosporin resistance |
| | | | | cerevisiae | | |
| 26 | PHE0000089 | 394 | CHL1 | Arabidopsis | 85-1857 | Chlorate/Nitrate |
| | | | | thaliana | | transporter |
| 27 | PHE0000090 | 395 | NTR1 | Oryza sativa | 144-1898 | Chlorate/Nitrate |
| | | | | | | transporter |
| 28 | PHE0000228 | 396 | Synechocystis cobA | Synechocystis | 70-801 | Siroheme synthesis |
| | | | | sp. PCC 6803 | | |
| 29 | PHE0000229 | 397 | Xylella tetrapyrrole | Xylella | 1-774 | Siroheme synthesis |
| | | | methylase | fastidiosa | | |
| 30 | PHE0000230 | 398 | maize | Zea mays | 15-1286 | Siroheme synthesis |
| | | | uroporphyrinogen III | | | |
| | | | methyltransferase | | | |
| 31 | PHE0000190 | 399 | LEA3 | Zea mays | 171-755 | Cold induced genes |
| 32 | PHE0000191 | 400 | non-specific lipid | Zea mays | 70-456 | Cold induced genes |
| | | | transfer protein | | | |
| 33 | PHE0000234 | 401 | soy LEA protein | Glycine max | 6-704 | Cold induced genes |
| 34 | PHE0000235 | 402 | dehydrin-like protein | Glycine max | 33-710 | Cold induced genes |
| 35 | PHE0000236 | 403 | glycine-rich protein | Zea mays | 91-558 | Cold induced genes |
| 36 | PHE0000237 | 404 | dehydrin 3 | Zea mays | 84-584 | Cold induced genes |
| 37 | PHE0000238 | 405 | probable lipase | Zea mays | 98-967 | Cold induced genes |
| 38 | PHE0000239 | 406 | yeast GRE1 | Saccharomyces | 1024-1527 | Cold induced genes |
| | | | | cerevisiae | | |
| 39 | PHE0000240 | 407 | yeast STF2 | Saccharomyces | 683-934 | Cold induced genes |
| | | | | cerevisiae | | |
| 40 | PHE0000241 | 408 | yeast SIP18 | Saccharomyces | 376-855 | Cold induced genes |
| | | | | cerevisiae | | |
| 41 | PHE0000242 | 409 | yeast YBM6 | Saccharomyces | 744-1130 | Cold induced genes |
| | | | | cerevisiae | | |
| 42 | PHE0000243 | 410 | yeast HSP12 | Saccharomyces | 282-611 | Cold induced genes |
| | | | | cerevisiae | | |
| 43 | PHE0000038 | 411 | corn cycD2.1 | Zea mays | 125-1156 | Corn cyclins |
| 44 | PHE0000043 | 412 | rice cycB1 | Oryza sativa | 148-1407 | Corn cyclins |
| 45 | PHE0000044 | 413 | rice cycC1 | Oryza sativa | 97-870 | Corn cyclins |
| 46 | PHE0000045 | 414 | rice cycB2 | Oryza sativa | 74-1336 | Corn cyclins |
| 47 | PHE0000046 | 415 | rice cycA1 | Oryza sativa | 97-1623 | Corn cyclins |
| 48 | PHE0000047 | 416 | rice cycB5 | Oryza sativa | 292-361, 1019-1347, | Corn cyclins |
| | | | | | 1447-1572, | |
| | | | | | 1657-1908, | |
| | | | | | 2059-2217, | |
| | | | | | 2315-2493, | |
| | | | | | 3276-3432 | |
| 49 | PHE0000050 | 417 | corn cycA2 | Zea mays | 107-1222 | Corn cyclins |
| 50 | PHE0000051 | 418 | corn cycB2 | Zea mays | 137-1408 | Corn cyclins |
| 51 | PHE0000052 | 419 | corn cycB5 | Zea mays | 82-1518 | Corn cyclins |
| 52 | PHE0000053 | 420 | corn cycB4 | Zea mays | 254-1579 | Corn cyclins |
| 53 | PHE0000054 | 421 | corn cycD3.2 | Zea mays | 220-1380 | Corn cyclins |
| 54 | PHE0000055 | 422 | corn cycDx.1 | Zea mays | 218-1180 | Corn cyclins |
| 55 | PHE0000056 | 423 | corn cycD1.1 | Zea mays | 288-1334 | Corn cyclins |
| 56 | PHE0000082 | 424 | corn cycB3 | Zea mays | 88-1425 | Corn cyclins |
| 57 | PHE0000101 | 425 | corn cycD3.1 | Zea mays | 250-1422 | Corn cyclins |
| 58 | PHE0000105 | 426 | corn cycD1.2 | Zea mays | 229-1275 | Corn cyclins |
| 59 | PHE0000106 | 427 | corn cycA1 | Zea mays | 107-1633 | Corn cyclins |
| 60 | PHE0000107 | 428 | corn cycD1.3 | Zea mays | 206-1252 | Corn cyclins |
| 61 | PHE0000382 | 429 | corn cycB1 | Zea mays | 114-1385 | Corn cyclins |
| 62 | PHE0000014 | 430 | rice cycD2 | Oryza sativa | 13-324, 623-709, | Cytokinins |
| | | | | | 813-911, | |
| | | | | | 1003-1204, | |
| | | | | | 1314-1438, | |
| | | | | | 1529-1774 | |
| 63 | PHE0000015 | 431 | rice GCR1 | Oryza sativa | 312-500, 1123-1154, | Cytokinins |
| | | | | | 1384-1553, | |
| | | | | | 2048-2163, | |
| | | | | | 2724-2825, | |
| | | | | | 2946-3002, | |
| | | | | | 3331-3474, | |
| | | | | | 3930-4000, | |
| | | | | | 4118-4223 | |
| 64 | PHE0000016 | 432 | kn 1 | Zea mays | 181-1257 | Cytokinins |
| 65 | PHE0000115 | 433 | Receiver domain | Zea mays | 277-1002 | Cytokinins |
| | | | (RR3-like) 7 | | | |
| 66 | PHE0000116 | 434 | Receiver domain | Zea mays | 188-2245 | Cytokinins |
| | | | (ARR2-like) 1 | | | |
| 67 | PHE0000117 | 435 | Receiver domain | Zea mays | 112-2238 | Cytokinins |
| | | | (TOC1-like) 2 | | | |
| 68 | PHE0000118 | 436 | Receiver domain | Zea mays | 84-1976 | Cytokinins |
| | | | (TOC1-like) 3 | | | |
| 69 | PHE0000119 | 437 | Receiver domain | Zea mays | 39-1931 | Cytokinins |
| | | | (ARR2-like) 4 | | | |
| 70 | PHE0000120 | 438 | Receiver domain | Zea mays | 61-1812 | Cytokinins |
| | | | (RR11-like) 5 | | | |
| 71 | PHE0000121 | 439 | Receiver domain | Zea mays | 391-1116 | Cytokinins |
| | | | (RR3-like) 6 | | | |
| 72 | PHE0000122 | 440 | Receiver domain | Zea mays | 335-1066 | Cytokinins |
| | | | (RR3-like) 8 | | | |
| 73 | PHE0000123 | 441 | Receiver domain 9 | Zea mays | 55-759 | Cytokinins |
| 74 | PHE0000124 | 442 | ZmRR2 | Zea mays | 154-624 | Cytokinins |
| 75 | PHE0000125 | 443 | Receiver domain | Zea mays | 374-722, 791-2019 | Cytokinins |
| | | | (TOC1-like) 10 | | | |
| 76 | PHE0000272 | 444 | corn GCR1 | Zea mays | 74-1036 | Cytokinins |
| 77 | PHE0000231 | 445 | nucellin-like protein | Zea mays | 122-1594 | Alteration of oil content |
| | | | | | | by effecting embryo size |
| 78 | PHE0000232 | 446 | nucellin-like protein | Zea mays | 76-1605 | Alteration of oil content |
| | | | | | | by effecting embryo size |
| 79 | PHE0000233 | 447 | nucellin-like protein | Zea mays | 195-1628 | Alteration of oil content |
| | | | | | | by effecting embryo size |
| 80 | PHE0000269 | 448 | soy E2F-like | Glycine max | 80-1117 | Cell cycle regulation by |
| | | | | | | E2F |
| 81 | PHE0000270 | 449 | nuclear matrix | Zea mays | 243-3371 | Cell cycle regulation by |
| | | | constituent protein | | | E2F |
| 82 | PHE0000271 | 450 | OsE2F1 | Oryza sativa | 93-1403 | Cell cycle regulation by |
| | | | | | | E2F |
| 83 | PHE0000067 | 451 | yeast eIF-5A | Saccharomyces | 569-1042 | Reduction of senescence |
| | | | | cerevisiae | | |
| 84 | PHE0000068 | 452 | yeast deoxyhypusine | Saccharomyces | 173-1336 | Reduction of senescence |
| | | | synthase | cerevisiae | | |
| 85 | PHE0000069 | 453 | yeast L5 | Saccharomyces | 987-1880 | Reduction of senescence |
| | | | | cerevisiae | | |
| 86 | PHE0000070 | 454 | yeast ornithine | Saccharomyces | 576-1976 | Reduction of senescence |
| | | | decarboxylase | cerevisiae | | |
| 87 | PHE0000071 | 455 | rice exportin 4-like | Oryza sativa | 501-750, 1257-1417, | Reduction of senescence |
| | | | | | 1735-1800, | |
| | | | | | 3104-3218, | |
| | | | | | 3318-3427, | |
| | | | | | 3525-3620, | |
| | | | | | 7587-7744, | |
| | | | | | 7828-7915, | |
| | | | | | 8565-8669, | |
| | | | | | 8774-8878, | |
| | | | | | 9421-9450, | |
| | | | | | 9544-9656, | |
| | | | | | 9732-9819, | |
| | | | | | 9961-10180, | |
| | | | | | 11034-11164, | |
| | | | | | 12058-12204, | |
| | | | | | 12770-12898, | |
| | | | | | 12975-13073, | |
| | | | | | 13221-13259, | |
| | | | | | 14674-14823 | |
| 88 | PHE0000072 | 456 | yeast S- | Saccharomyces | 415-1605 | Reduction of senescence |
| | | | adenosylmethionine | cerevisiae | | |
| | | | decarboxylase | | | |
| 89 | PHE0000073 | 457 | corn S- | Zea mays | 268-1365 | Reduction of senescence |
| | | | adenosylmethionine | | | |
| | | | decarboxylase 1 | | | |
| 90 | PHE0000074 | 458 | corn S- | Zea mays | 581-1780 | Reduction of senescence |
| | | | adenosylmethionine | | | |
| | | | decarboxylase 2 | | | |
| 91 | PHE0000204 | 459 | deoxyhypusine | Glycine max | 26-1129 | Reduction of senescence |
| | | | synthase | | | |
| 92 | PHE0000291 | 460 | deoxyhypusine | Zea mays | 54-1163 | Reduction of senescence |
| | | | synthase | | | |
| 93 | PHE0000292 | 461 | corn eIF-5A | Zea mays | 85-564 | Reduction of senescence |
| 94 | PHE0000286 | 462 | oryzacystatin | Oryza sativa | 108-527 | Endogenous insecticides |
| 95 | PHE0000287 | 463 | Similar to cysteine | Oryza sativa | 18-767 | Endogenous insecticides |
| | | | proteinase inhibitor | | | |
| 96 | PHE0000288 | 464 | cysteine proteinase | Sorghum | 135-461 | Endogenous insecticides |
| | | | inhibitor | bicolor | | |
| 97 | PHE0000001 | 465 | esk2-like-cellulose | Zea mays | 113-3061 | Freezing tolerance- |
| | | | synthase | | | Eskimo 2 |
| 98 | PHE0000227 | 466 | soy omega-3 fatty | Glycine max | 138-1496 | Fatty acid desaturases |
| | | | acid desaturase | | | |
| 99 | PHE0000258 | 467 | AtFAD7 | Arabidopsis | 132-1472 | Fatty acid desaturases |
| | | | | thaliana | | |
| 100 | PHE0000259 | 468 | AtFAD8 | Arabidopsis | 61-1368 | Fatty acid desaturases |
| | | | | thaliana | | |
| 101 | PHE0000260 | 469 | desB | Synechocystis | 643-1719 | Fatty acid desaturases |
| | | | | sp. PCC 6803 | | |
| 102 | PHE0000186 | 470 | maize ferritin 2 | Zea mays | 3-758 | Ferritin |
| 103 | PHE0000187 | 471 | maize ferritin 1 | Zea mays | 34-795 | Ferritin |
| 104 | PHE0000188 | 472 | E. coli cytoplasmic | Escherichia | 245-742 | Ferritin |
| | | | ferritin | coli | | |
| 105 | PHE0000102 | 473 | AnFPPS (farnesyl- | Emericella | 146-1186 | Farnesylpyrophosphate |
| | | | pyrophosphate | nidulans | | synthase |
| | | | synthetase) | | | |
| 106 | PHE0000103 | 474 | OsFPPS | Oryza sativa | 42-1103 | Farnesylpyrophosphate |
| | | | | | | synthase |
| 107 | PHE0000104 | 475 | corn FPPS 2 | Zea mays | 313-1377 | Farnesylpyrophosphate |
| | | | | | | synthase |
| 108 | PHE0000277 | 476 | wheat G28-like | Triticum | 65-877 | Fungal Resistance |
| | | | | aestivum | | |
| 109 | PHE0000261 | 477 | yeast glutamate | Saccharomyces | 33-1790 | Gamma-aminobutyric |
| | | | decarboxylase | cerevisiae | | acid synthesis |
| 110 | PHE0000019 | 478 | AOX1a | Oryza sativa | 4531-4851, 5011-5139, | Heat generation |
| | | | | | 6072-6560, | |
| | | | | | 6663-6722 | |
| 111 | PHE0000020 | 479 | alxA | Emericella | 2189-2442, 2492-2783, | Heat generation |
| | | | | nidulans | 2843-3352 | |
| 112 | PHE0000095 | 480 | HSF1 | Saccharomyces | 1017-3518 | Heat tolerance |
| | | | | cerevisiae | | |
| 113 | PHE0000096 | 481 | Zm HSP101 | Zea mays | 436-1773, 1878-2159, | Heat tolerance |
| | | | | | 2281-2621, | |
| | | | | | 2711-2990, | |
| | | | | | 3079-3276, | |
| | | | | | 3371-3670 | |
| 114 | PHE0000097 | 482 | HSP104 | Saccharomyces | 334-3060 | Heat tolerance |
| | | | | cerevisiae | | |
| 115 | PHE0000098 | 483 | E. coli clpB | Escherichia | 557-3130 | Heat tolerance |
| | | | | coli | | |
| 116 | PHE0000099 | 484 | Synechocystis clpB | Synechocystis | 316-2931 | Heat tolerance |
| | | | | sp. PCC 6803 | | |
| 117 | PHE0000100 | 485 | Xylella clpB | Xylella | 187-2769 | Heat tolerance |
| | | | | fastidiosa | | |
| 118 | PHE0000192 | 486 | soy HSF | Glycine max | 23-1114 | Heat tolerance |
| 119 | PHE0000193 | 487 | soy HSF | Glycine max | 93-992 | Heat tolerance |
| 120 | PHE0000133 | 488 | G protein b subunit | Zea mays | 90-1229 | Heterotrimeric G |
| | | | | | | proteins |
| 121 | PHE0000273 | 489 | soy mlo-like | Glycine max | 15-1532 | Heterotrimeric G |
| | | | | | | proteins |
| 122 | PHE0000274 | 490 | soy mlo-like | Glycine max | 48-1841 | Heterotrimeric G |
| | | | | | | proteins |
| 123 | PHE0000275 | 491 | rice G alpha 1 | Oryza sativa | 106-1248 | Heterotrimeric G |
| | | | | | | proteins |
| 124 | PHE0000276 | 492 | soy G-gamma subunit | Glycine max | 210-536 | Heterotrimeric G |
| | | | | | | proteins |
| 125 | PHE0000062 | 493 | sRAD54 - with NLS | Synechocystis | 437-3556 | Homologous |
| | | | | sp. PCC 6803 | | recombination |
| 126 | PHE0000063 | 494 | T4 endonuclease VII | coliphage T4 | 603-1148 | Homologous |
| | | | (gp49) - with NLS | | | recombination |
| 127 | PHE0000169 | 495 | maize p23 | Zea mays | 106-708 | HSP90 |
| 128 | PHE0000170 | 496 | maize cyclophilin | Zea mays | 99-1757 | HSP90 |
| 129 | PHE0000171 | 497 | yeast HSP82 | Saccharomyces | 333-2462 | HSP90 |
| | | | | cerevisiae | | |
| 130 | PHE0000172 | 498 | yeast SIT1 | Saccharomyces | 361-2130 | HSP90 |
| | | | | cerevisiae | | |
| 131 | PHE0000173 | 499 | yeast CNS1 | Saccharomyces | 762-1919 | HSP90 |
| | | | | cerevisiae | | |
| 132 | PHE0000174 | 500 | yeast HCH1 | Saccharomyces | 193-654 | HSP90 |
| | | | | cerevisiae | | |
| 133 | PHE0000298 | 501 | rice p23 co-chaperone | Oryza sativa | 68-706 | HSP90 |
| 134 | PHE0000299 | 502 | corn p23 co- | Zea mays | 71-565 | HSP90 |
| | | | chaperone | | | |
| 135 | PHE0000300 | 503 | rice p23 co-chaperone | Oryza sativa | 124-642 | HSP90 |
| 136 | PHE0000301 | 504 | corn p23 co- | Zea mays | 90-617 | HSP90 |
| | | | chaperone | | | |
| 137 | PHE0000436 | 505 | rice cns1-like | Oryza sativa | 121-1242 | HSP90 |
| 138 | PHE0000437 | 506 | corn HCH1-like 1 | Zea mays | 42-1100 | HSP90 |
| 139 | PHE0000438 | 507 | corn HOP-like 1 | Zea mays | 88-1830 | HSP90 |
| 140 | PHE0000439 | 508 | corn HOP-like 2 | Zea mays | 65-1261 | HSP90 |
| 141 | PHE0000440 | 509 | rice CHIP-like 1 | Oryza sativa | 121-939 | HSP90 |
| 142 | PHE0000441 | 510 | corn CHIP-like 2 | Zea mays | 115-939 | HSP90 |
| 143 | PHE0000442 | 511 | corn HSP90 1 | Zea mays | 55-2478 | HSP90 |
| 144 | PHE0000443 | 512 | rice HSP90 1 | Oryza sativa | 68-2500 | HSP90 |
| 145 | PHE0000444 | 513 | corn HSP90 2 | Zea mays | 63-2423 | HSP90 |
| 146 | PHE0000445 | 514 | sorghum HSP90 1 | Sorghum | 138-2285 | HSP90 |
| | | | | bicolor | | |
| 147 | PHE0000446 | 515 | rice HSP90 2 | Oryza sativa | 78-2174 | HSP90 |
| 148 | PHE0000215 | 516 | invW | Oryza sativa | 1108-1489, 1813-2684, | Invertase |
| | | | | | 6105-6266, | |
| | | | | | 6417-6658, | |
| 149 | PHE0000248 | 517 | Zm lipoxygenase | Zea mays | 89-2821 | Jasmonate |
| 150 | PHE0000249 | 518 | corn allene oxide | Zea mays | 111-1556 | Jasmonate |
| | | | synthase | | | |
| 151 | PHE0000250 | 519 | corn COI1-like | Zea mays | 139-1911 | Jasmonate |
| 152 | PHE0000252 | 520 | corn COI1-like | Zea mays | 130-1923 | Jasmonate |
| 153 | PHE0000253 | 521 | COI1-like | Zea mays | 389-2368 | Jasmonate |
| 154 | PHE0000256 | 522 | corn 1- | Zea mays | 61-1011 | Jasmonate |
| | | | aminocyclopropane- | | | |
| | | | 1-carboxylate oxidase | | | |
| 155 | PHE0000257 | 523 | rice 1- | Oryza sativa | 2-1465 | Jasmonate |
| | | | aminocyclopropane-1 | | | |
| | | | carboxylate synthase | | | |
| 156 | PHE0000432 | 524 | corn 12- | Zea mays | 128-1240 | Jasmonate |
| | | | oxophytodienoate | | | |
| | | | reductase 1 | | | |
| 157 | PHE0000433 | 525 | corn 12-oxo- | Zea mays | 166-1242 | Jasmonate |
| | | | phytodienoate | | | |
| | | | reductase-like 3 | | | |
| 158 | PHE0000434 | 526 | corn 12- | Zea mays | 92-1210 | Jasmonate |
| | | | oxophytodienoate | | | |
| | | | reductase-like 4 | | | |
| 159 | PHE0000435 | 527 | corn hydroperoxide | Zea mays | 83-1594 | Jasmonate |
| | | | lyase | | | |
| 160 | PHE0000484 | 528 | soy JMT-like protien 1 | Glycine max | 26-1135 | Jasmonate |
| 161 | PHE0000485 | 529 | corn JMT-like protein 1 | Zea mays | 39-1184 | Jasmonate |
| 162 | PHE0000486 | 530 | corn JMT-like protein 2 | Zea mays | 63-1208 | Jasmonate |
| 163 | PHE0000077 | 531 | yeast | Saccharomyces | 1695-2894 | Nitric oxide |
| | | | flavohemoglobin - | cerevisiae | | |
| | | | chloroplastic | | | |
| 164 | PHE0000039 | 532 | nph1 | Zea mays | 415-3150 | Photomorphogenic |
| | | | | | | responses |
| 165 | PHE0000176 | 533 | RNAse S | Zea mays | 85-771 | Phosphate uptake |
| 166 | PHE0000177 | 534 | maize ecto-apyrase | Zea mays | 210-2312 | Phosphate uptake |
| 167 | PHE0000178 | 535 | PHO5 | Saccharomyces | 1-1404 | Phosphate uptake |
| | | | | cerevisiae | | |
| 168 | PHE0000179 | 536 | high affinity | Glycine max | 105-1703 | Phosphate uptake |
| | | | phosphate | | | |
| | | | translocator | | | |
| 169 | PHE0000180 | 537 | high affinity | Zea mays | 128-1750 | Phosphate uptake |
| | | | phosphate | | | |
| | | | translocator | | | |
| 170 | PHE0000181 | 538 | Xylella citrate | Xylella | 256-1545 | Phosphate uptake |
| | | | synthase | fastidiosa | | |
| 171 | PHE0000182 | 539 | E. coli citrate | Escherichia | 309-1592 | Phosphate uptake |
| | | | synthase | coli | | |
| 172 | PHE0000183 | 540 | rice citrate synthase | Oryza sativa | 105-1523 | Phosphate uptake |
| 173 | PHE0000184 | 541 | citrate synthase | Zea mays | 56-1564 | Phosphate uptake |
| 174 | PHE0000185 | 542 | citrate synthase | Glycine max | 153-1691 | Phosphate uptake |
| 175 | PHE0000302 | 543 | putative purple acid | Oryza sativa | 22-1038 | Phosphate uptake |
| | | | phosphatase precursor | | | |
| 176 | PHE0000303 | 544 | acid phosphatase type 5 | Zea mays | 143-1186 | Phosphate uptake |
| 177 | PHE0000304 | 545 | aleurone ribonuclease | Oryza sativa | 47-814 | Phosphate uptake |
| 178 | PHE0000305 | 546 | putative ribonuclease | Zea mays | 55-888 | Phosphate uptake |
| 179 | PHE0000306 | 547 | S-like RNase | Zea mays | 15-770 | Phosphate uptake |
| 180 | PHE0000307 | 548 | ribonuclease | Zea mays | 95-781 | Phosphate uptake |
| 181 | PHE0000027 | 549 | SbPhytochrome A | Sorghum | 238-3633 | Phytochrome |
| | | | | bicolor | | |
| 182 | PHE0000028 | 550 | OsPhytochrome B | Oryza sativa | 67-3582 | Phytochrome |
| 183 | PHE0000029 | 551 | SbPhytochrome B | Sorghum | 429-2640, 3333-4140, | Phytochrome |
| | | | | bicolor | 5819-6112, | |
| | | | | | 7491-7713 | |
| 184 | PHE0000030 | 552 | OsPhytochrome C | Oryza sativa | 1036-3100, 3205-4021, | Phytochrome |
| | | | | | 4418-4711, | |
| | | | | | 5272-5509 | |
| 185 | PHE0000031 | 553 | SbPhytochrome C | Sorghum | 303-3710 | Phytochrome |
| | | | | bicolor | | |
| 186 | PHE0000032 | 554 | Positive Factor 1 | Oryza sativa | 35-676 | Phytochrome |
| 187 | PHE0000033 | 555 | GT-2 | Oryza sativa | 58-2271 | Phytochrome |
| 188 | PHE0000034 | 556 | biliverdin IXa | Synechocystis | 9-992 | Phytochrome |
| | | | reductase | sp. PCC 6803 | | |
| 189 | PHE0000049 | 557 | OsPhytochrome A | Oryza sativa | 4626-6690, 6913-7729, | Phytochrome |
| | | | | | 8011-8307, | |
| | | | | | 8410-8617 | |
| 190 | PHE0000057 | 558 | corn mt NDK - | Zea mays | 60-725 | Phytochrome |
| | | | LIB189022Q1E1E9 | | | |
| 191 | PHE0000058 | 559 | corn cp NDK - | Zea mays | 103-816 | Phytochrome |
| | | | 700479629 | | | |
| 192 | PHE0000059 | 560 | corn NDK - | Zea mays | 49-495 | Phytochrome |
| | | | LIB3597020Q1K6C3 | | | |
| 193 | PHE0000060 | 561 | corn NDK - | Zea mays | 162-608 | Phytochrome |
| | | | 700241377 | | | |
| 194 | PHE0000061 | 562 | OsGAI | Oryza sativa | 216-2093 | Phytochrome |
| 195 | PHE0000064 | 563 | corn NDPK - fC- | Zea mays | 91-624 | Phytochrome |
| | | | zmemLIB3957015Q1 | | | |
| | | | K6H6 | | | |
| 196 | PHE0000111 | 564 | PAS domain kinase | Zea mays | 358-2613 | Phytochrome |
| 197 | PHE0000126 | 565 | corn HY5-like | Zea mays | 32-541 | Phytochrome |
| 198 | PHE0000127 | 566 | scarecrow 1 (PAT1- | Zea mays | 295-1929 | Phytochrome |
| | | | like) | | | |
| 199 | PHE0000128 | 567 | scarecrow 2 | Zea mays | 153-1934 | Phytochrome |
| 200 | PHE0000283 | 568 | scarecrow 6 | Zea mays | 520-2145 | Phytochrome |
| 201 | PHE0000293 | 569 | gibberellin response | Zea mays | 131-2020 | Phytochrome |
| | | | modulator | | | |
| 202 | PHE0000294 | 570 | scarecrow-like protein | Zea mays | 266-1948 | Phytochrome |
| 203 | PHE0000308 | 571 | helix-loop-helix | Zea mays | 202-756 | Phytochrome |
| | | | protein (PIF3-like) | | | |
| 204 | PHE0000318 | 572 | scarecrow 17 | Zea mays | 441-2102 | Phytochrome |
| 205 | PHE0000361 | 573 | PAT1-like scarecrow 9 | Zea mays | 191-1900 | Phytochrome |
| 206 | PHE0000427 | 574 | corn SPA1-like 1 | Zea mays | 227-3139 | Phytochrome |
| 207 | PHE0000428 | 575 | corn PIF3-like | Zea mays | 173-856 | Phytochrome |
| 208 | PHE0000429 | 576 | soy Athb-2-like 1 | Glycine max | 78-932 | Phytochrome |
| 209 | PHE0000430 | 577 | corn SUB1-like 1 | Zea mays | 44-1954 | Phytochrome |
| 210 | PHE0000431 | 578 | soy GH3 protein | Glycine max | 42-1820 | Phytochrome |
| 211 | PHE0000065 | 579 | TOR1 | Saccharomyces | 302-7714 | TOR pathway |
| | | | | cerevisiae | | |
| 212 | PHE0000152 | 580 | 14-3-3-like protein 2 | Glycine max | 85-861 | TOR pathway |
| 213 | PHE0000153 | 581 | 14-3-3-like protein D | Glycine max | 42-824 | TOR pathway |
| 214 | PHE0000154 | 582 | 14-3-3 protein 1 | Glycine max | 49-834 | TOR pathway |
| 215 | PHE0000155 | 583 | Rice FAP1-like | Oryza sativa | 654-1862, 2310-2426, | TOR pathway |
| | | | protein | | 3407-3492, | |
| | | | | | 3590-3752, | |
| | | | | | 3845-3890, | |
| | | | | | 4476-4522, | |
| | | | | | 4985-5191, | |
| | | | | | 5306-5392, | |
| | | | | | 5473-5640 | |
| 216 | PHE0000156 | 584 | rice TAP42-like | Oryza sativa | 199-1338 | TOR pathway |
| 217 | PHE0000157 | 585 | rice eIF-4E | Oryza sativa | 58-741 | TOR pathway |
| 218 | PHE0000158 | 586 | BMH1 | Saccharomyces | 79-882 | TOR pathway |
| | | | | cerevisiae | | |
| 219 | PHE0000311 | 587 | GF14-c protein | Oryza sativa | 81-848 | TOR pathway |
| 220 | PHE0000312 | 588 | 14-3-3-like protein | Oryza sativa | 6-785 | TOR pathway |
| 221 | PHE0000313 | 589 | rice eIF-(iso)4F | Oryza sativa | 96-713 | TOR pathway |
| 222 | PHE0000314 | 590 | rice eIF-4F | Oryza sativa | 46-726 | TOR pathway |
| 223 | PHE0000315 | 591 | sorghum eIF-(iso)4F | Sorghum | 78-707 | TOR pathway |
| | | | | bicolor | | |
| 224 | PHE0000316 | 592 | sorghum eIF-4F | Sorghum | 9-668 | TOR pathway |
| | | | | bicolor | | |
| 225 | PHE0000317 | 593 | rice F1P37-like | Oryza sativa | 73-1128 | TOR pathway |
| 226 | PHE0000040 | 594 | Zm Hb1-hemoglobin | Zea mays | 172-669 | Plant hemoglobins |
| 227 | PHE0000400 | 595 | soy G559-like | Glycine max | 301-1560 | Plant hemoglobins |
| 228 | PHE0000091 | 596 | Zm SET domain 2 | Zea mays | 101-1009 | Polycomb proteins for |
| | | | | | | apomixis |
| 229 | PHE0000092 | 597 | Zm SET domain 1 | Zea mays | 528-1544 | Polycomb proteins for |
| | | | | | | apomixis |
| 230 | PHE0000114 | 598 | Su(var) 3-9-like | Zea mays | 71-814 | Polycomb proteins for |
| | | | | | | apomixis |
| 231 | PHE0000175 | 599 | corn EZA1-like | Zea mays | 34-2706 | Polycomb proteins for |
| | | | | | | apomixis |
| 232 | PHE0000282 | 600 | SET-domain protein- | Zea mays | 478-3045 | Polycomb proteins for |
| | | | like | | | apomixis |
| 233 | PHE0000075 | 601 | retinoblastoma-related | Zea mays | 37-2634 | Retinoblastoma (Rb) like |
| | | | protein 1 | | | genes |
| 234 | PHE0000076 | 602 | C1 protein | Wheat dwarf | 49-843 | Retinoblastoma (Rb) like |
| | | | | virus | | genes |
| 235 | PHE0000006 | 603 | RAP2.8/G9 | Arabidopsis | 81-1136 | Root mass |
| | | | | thaliana | | |
| 236 | PHE0000007 | 604 | rice G9-like 1 | Oryza sativa | 336-1430 | Root mass |
| 237 | PHE0000008 | 605 | rice G9-like 2 | Oryza sativa | 572-1522 | Root mass |
| 238 | PHE0000012 | 606 | rs81 | Zea mays | 1-747 | Root mass |
| 239 | PHE0000013 | 607 | rs288 | Zea mays | 1-864 | Root mass |
| 240 | PHE0000244 | 608 | corn SVP-like | Zea mays | 177-860 | Short vegetative phase |
| 241 | PHE0000245 | 609 | corn SVP-like | Zea mays | 93-791 | Short vegetative phase |
| 242 | PHE0000246 | 610 | soy SVP-like | Glycine max | 96-713 | Short vegetative phase |
| 243 | PHE0000247 | 611 | soy jointless-like | Glycine max | 60-674 | Short vegetative phase |
| 244 | PHE0000451 | 612 | wheat SVP-like 1 | Triticum | 149-736 | Short vegetative phase |
| | | | | aestivum | | |
| 245 | PHE0000452 | 613 | corn SVP-like 3 | Zea mays | 75-749 | Short vegetative phase |
| 246 | PHE0000453 | 614 | corn SVP-like 5 | Zea mays | 304-774, 956-1219 | Short vegetative phase |
| 247 | PHE0000087 | 615 | STURDY | Arabidopsis | 329-1267, 1353-1562 | Lodging resistance |
| | | | | thaliana | | |
| 248 | PHE0000088 | 616 | patatin-like protein | Nostoc | 451-2184 | Lodging resistance |
| | | | | PCC7120 | | |
| 249 | PHE0000220 | 617 | corn RNase PH | Zea mays | 86-805 | Virus resistance |
| 250 | PHE0000221 | 618 | SKI2 | Saccharomyces | 1351-5211 | Virus resistance |
| | | | | cerevisiae | | |
| 251 | PHE0000222 | 619 | SKI3 | Saccharomyces | 793-5091 | Virus resistance |
| | | | | cerevisiae | | |
| 252 | PHE0000223 | 620 | SKI4 | Saccharomyces | 323-1201 | Virus resistance |
| | | | | cerevisiae | | |
| 253 | PHE0000224 | 621 | SKI6 | Saccharomyces | 1007-1747 | Virus resistance |
| | | | | cerevisiae | | |
| 254 | PHE0000225 | 622 | SKI7 | Saccharomyces | 279-2519 | Virus resistance |
| | | | | cerevisiae | | |
| 255 | PHE0000226 | 623 | rice SKI7-like | Oryza sativa | 464-884, 1132-1287, | Virus resistance |
| | | | | | 2103-2252, | |
| | | | | | 2353-2487, | |
| | | | | | 2957-3288, | |
| | | | | | 3399-3509, | |
| | | | | | 3596-4095, | |
| | | | | | 4350-4518, | |
| | | | | | 4783-5022, | |
| | | | | | 5097-5228, | |
| | | | | | 5315-5449 | |
| 256 | PHE0000309 | 624 | SKI4-like protein | Zea mays | 36-632 | Virus resistance |
| 257 | PHE0000310 | 625 | putative 3 | Zea mays | 238-1098 | Virus resistance |
| | | | exoribonuclease | | | |
| 258 | PHE0000159 | 626 | rice chloroplastic | Oryza sativa | 41-1261 | Yield associated genes |
| | | | fructose-1,6- | | | |
| | | | bisphosphatase | | | |
| 259 | PHE0000160 | 627 | E. coli fructose-1,6- | Eseherichia | 208-1206 | Yield associated genes |
| | | | bisphosphatase | coli | | |
| 260 | PHE0000161 | 628 | Synechocystis | Synechocystis | 1-1164 | Yield associated genes |
| | | | fructose-1,6- | sp. PCC 6803 | | |
| | | | bisphosphatase F-I | | | |
| 261 | PHE0000162 | 629 | Synechocystis | Synechocystis | 480-1523 | Yield associated genes |
| | | | fructose-1,6- | sp. PCC 6803 | | |
| | | | bisphosphatase F-II | | | |
| 262 | PHE0000163 | 630 | Rice TBP1 | Oryza sativa | 26-1315 | Yield associated genes |
| 263 | PHE0000164 | 631 | Yeast RPT5 | Saccharomyces | 883-2187 | Yield associated genes |
| | | | | cerevisiae | | |
| 264 | PHE0000165 | 632 | Yeast RRP5 | Saccharomyces | 331-5520 | Yield associated genes |
| | | | | cerevisiae | | |
| 265 | PHE0000166 | 633 | Rice CBP-like gene | Oryza sativa | 277-436, 479-1524 | Yield associated genes |
| | | | | | 1790-2065, | |
| | | | | | 2150-2425, | |
| | | | | | 3134-3262, | |
| | | | | | 3380-3580, | |
| | | | | | 3683-3825, | |
| | | | | | 3905-4190, | |
| | | | | | 4294-4433, | |
| | | | | | 4711-4789, | |
| | | | | | 4874-4929, | |
| | | | | | 5754-5946 | |
| 266 | PHE0000167 | 634 | rice BAB09754 | Oryza sativa | 616-903, 1848-1940, | Yield associated genes |
| | | | | | 2046-2165, | |
| | | | | | 2254-2355, | |
| | | | | | 2443-2693, | |
| | | | | | 2849-2994, | |
| | | | | | 3165-3363, | |
| | | | | | 3475-4141, | |
| | | | | | 4438-4770, | |
| | | | | | 5028-5309 | |
| 267 | PHE0000168 | 635 | LIB3061-001-H7 FLI | Zea mays | 309-1037 | Yield associated genes |
| 268 | PHE0000295 | 636 | ubiquitin-conjugating | Zea mays | 114-599 | Yield associated genes |
| | | | enzyme-like protein | | | |
| 269 | PHE0000296 | 637 | unknown protein | Zea mays | 90-785 | Yield associated genes |
| | | | recognized by | | | |
| | | | PF01169 | | | |
| 270 | PHE0000297 | 638 | 26S protease | Oryza sativa | 57-1343 | Yield associated genes |
| | | | regulatory subunit 6A | | | |
| | | | homolog | | | |
| 271 | PHE0000454 | 639 | fC-zmhuLIB3062- | Zea mays | 113-853 | Yield associated genes |
| | | | 044-Q1-K1-B8 | | | |
| 272 | PHE0000455 | 640 | corn E4/E8 binding | Zea mays | 253-2259 | Yield associated genes |
| | | | protein-like | | | |
| 273 | PHE0000009 | 641 | F9L1.31/G975 | Arabidopsis | 58-654 | Wax biosynthesis |
| 274 | PHE0000010 | 642 | rice G975 | Oryza sativa | 201-283, 516-1161 | Wax biosynthesis |
| 275 | PHE0000011 | 643 | glossy15 | Zea mays | 385-1722 | Wax biosynthesis |
| 276 | PHE0000079 | 644 | CUT1 | Oryza sativa | 372-1082, 1176-1946 | Wax biosynthesis |
| 277 | PHE0000278 | 645 | corn G975 | Zea mays | 41-679 | Wax biosynthesis |
| 278 | PHE0000024 | 646 | 700456686H1 | Zea mays | 441-2390 | Alteration of |
| | | | | | | development |
| 279 | PHE0000025 | 647 | ZmGRF1 | Zea mays | 55-1470 | Growth regulating factor 1 |
| 280 | PHE0000026 | 648 | OsGRF1 | Oryza sativa | 193-1380 | Growth regulating factor 1 |
| 281 | PHE0000289 | 649 | Zm-GRF1 (GA | Zea mays | 96-1202 | Growth regulating factor 1 |
| | | | responsive factor) | | | |
| 282 | PHE0000290 | 650 | ZmSE001-like | Zea mays | 253-2115 | Alteration of |
| | | | | | | development |
| 283 | PHE0000216 | 651 | thylakoid carbonic | Nostoc | 49-843 | Carbonic anhydrase |
| | | | anhydrase, ecaA | PCC7120 | | |
| 284 | PHE0000217 | 652 | bicarbonate | Chlamydomon | 156-1232 | Carbonic anhydrase |
| | | | transporter, LIP-36G1 | as reinhardtii | | |
| 285 | PHE0000218 | 653 | bicarbonate | Synechococcus | 271-1674 | Carbonic anhydrase |
| | | | transporter, cp | sp. PCC 7942 | | |
| | | | stromal IctB | | | |
| 286 | PHE0000219 | 654 | thylakoid carbonic | Chlamydomon | 62-994 | Carbonic anhydrase |
| | | | anhydrase, cah3 | as reinhardtii | | |
| 287 | PHE0000251 | 655 | corn TIR1-like | Zea mays | 113-1906 | F-box proteins |
| 288 | PHE0000254 | 656 | F-box protein | Glycine max | 123-1304 | F-box proteins |
| 289 | PHE0000255 | 657 | F-box protein | Glycine max | 228-1916 | F-box proteins |
| 290 | PHE0000357 | 658 | maize tubby-like | Zea mays | 519-1958 | F-box proteins |
| 291 | PHE0000358 | 659 | maize tubby-like | Zea mays | 517-1269 | F-box proteins |
| 292 | PHE0000359 | 660 | soy HMG CoA | Glycine max | 80-1441 | HMG_CoA synthase |
| | | | synthase | | | |
| 293 | PHE0000360 | 661 | yeast HMGS | Saccharomyces | 220-1695 | HMG_CoA synthase |
| | | | | cerevisiae | | |
| 294 | PHE0000319 | 662 | maize MnSOD | Zea mays | 249-947 | Oxidative stress |
| 295 | PHE0000320 | 663 | sodB | Escherichia | 94-675 | Oxidative stress |
| | | | | coli | | |
| 296 | PHE0000321 | 664 | Synechococcus sp. | Synechococcus | 142-747 | Oxidative stress |
| | | | PCC 7942 sodB | sp. PCC 7942 | | |
| 297 | PHE0000322 | 665 | maize catalase-1 | Zea mays | 208-1683 | Oxidative stress |
| 298 | PHE0000323 | 666 | maize catalase-3 | Zea mays | 30-1511 | Oxidative stress |
| 299 | PHE0000324 | 667 | ascorbate peroxidase | Zea mays | 197-1063 | Oxidative stress |
| 300 | PHE0000325 | 668 | corn GDI | Zea mays | 57-1397 | Oxidative stress |
| 301 | PHE0000326 | 669 | soy GDI | Glycine max | 45-1418 | Oxidative stress |
| 302 | PHE0000327 | 670 | corn rho GDI | Zea mays | 463-1203 | Oxidative stress |
| 303 | PHE0000328 | 671 | basic blue copper | Zea mays | 13-408 | Oxidative stress |
| | | | protein | | | |
| 304 | PHE0000329 | 672 | plantacyanin | Zea mays | 109-489 | Oxidative stress |
| 305 | PHE0000330 | 673 | basic blue copper | Glycine max | 83-463 | Oxidative stress |
| | | | protein | | | |
| 306 | PHE0000331 | 674 | Similar to blue copper | Zea mays | 323-868 | Oxidative stress |
| | | | protein precursor | | | |
| 307 | PHE0000332 | 675 | lamin | Zea mays | 62-646 | Oxidative stress |
| 308 | PHE0000333 | 676 | allyl alcohol | Zea mays | 56-1105 | Oxidative stress |
| | | | dehydrogenase | | | |
| 309 | PHE0000334 | 677 | allyl alcohol | Glycine max | 103-1128 | Oxidative stress |
| | | | dehydrogenase | | | |
| 310 | PHE0000335 | 678 | allyl alcohol | Zea mays | 6-1079 | Oxidative stress |
| | | | dehydrogenase | | | |
| 311 | PHE0000336 | 679 | quinone | Zea mays | 47-1051 | Oxidative stress |
| | | | oxidoreductase | | | |
| 312 | PHE0000337 | 680 | E. nidulans cysA | Emericella | 384-1961 | Oxidative stress |
| | | | | nidulans | | |
| 313 | PHE0000338 | 681 | serine | Synechocystis | 801-1547 | Oxidative stress |
| | | | acetyltransferase | sp. PCC 6803 | | |
| 314 | PHE0000339 | 682 | Synechocystis thiol- | Synechocystis | 36-638 | Oxidative stress |
| | | | specific antioxidant | sp. PCC 6803 | | |
| | | | protein | | | |
| 315 | PHE0000340 | 683 | yeast TSA2 | Saccharomyces | 108-698 | Oxidative stress |
| | | | | cerevisiae | | |
| 316 | PHE0000341 | 684 | yeast mTPx | Saccharomyces | 730-1512 | Oxidative stress |
| | | | | cerevisiae | | |
| 317 | PHE0000342 | 685 | yeast nTPx | Saccharomyces | 103-750 | Oxidative stress |
| | | | | cerevisiae | | |
| 318 | PHE0000343 | 686 | yeast TPx III | Saccharomyces | 657-1187 | Oxidative stress |
| | | | | cerevisiae | | |
| 319 | PHE0000344 | 687 | corn type 2 | Zea mays | 37-522 | Oxidative stress |
| | | | peroxiredoxin | | | |
| 320 | PHE0000345 | 688 | soy putative 2-cys | Glycine max | 160-939 | Oxidative stress |
| | | | peroxiredoxin | | | |
| 321 | PHE0000346 | 689 | soy peroxiredoxin | Glycine max | 104-745 | Oxidative stress |
| 322 | PHE0000347 | 690 | heat shock protein 26, | Zea mays | 117-836 | Oxidative stress |
| | | | plastid-localized | | | |
| 323 | PHE0000348 | 691 | heat shock protein | Zea mays | 79-732 | Oxidative stress |
| | | | hsp22 precursor, | | | |
| | | | mitochondrial | | | |
| 324 | PHE0000349 | 692 | heat shock protein | Zea mays | 112-735 | Oxidative stress |
| 325 | PHE0000350 | 693 | low molecular weight | Zea mays | 28-690 | Oxidative stress |
| | | | heat shock protein | | | |
| 326 | PHE0000351 | 694 | 18 kDa heat shock | Zea mays | 103-597 | Oxidative stress |
| | | | protein | | | |
| 327 | PHE0000352 | 695 | heat shock protein | Zea mays | 229-690 | Oxidative stress |
| | | | 16.9 | | | |
| 328 | PHE0000353 | 696 | HSP21-like protein | Zea mays | 73-696 | Oxidative stress |
| 329 | PHE0000354 | 697 | Opt1p | Saccharomyces | 508-2904 | Oxidative stress |
| | | | | cerevisiae | | |
| 330 | PHE0000355 | 698 | SVCT2-like permease | Zea mays | 220-1779 | Oxidative stress |
| 331 | PHE0000356 | 699 | SVCT2-like permease | Zea mays | 34-1632 | Oxidative stress |
| 332 | PHE0000385 | 700 | H+ transporting | Zea mays | 176-2836 | ATP synthesis |
| | | | ATPase | | | |
| 333 | PHE0000386 | 701 | cation-transporting | Zea mays | 222-2168 | ATP synthesis |
| | | | ATPase | | | |
| 334 | PHE0000387 | 702 | yeast DRS2 (ALA1- | Saccharomyces | 170-4237 | ATP synthesis |
| | | | like) | cerevisiae | | |
| 335 | PHE0000388 | 703 | S. pombe ALA1-like | Schizosaccharo | 56-3832 | ATP synthesis |
| | | | | myces pombe | | |
| 336 | PHE0000389 | 704 | rice ALA1-like 1 | Oryza sativa | 47-1538,1619-1925, | ATP synthesis |
| | | | | | 3116-3824, | |
| | | | | | 3920-4043, | |
| | | | | | 4143-4362, | |
| | | | | | 4590-5048, | |
| | | | | | 5937-6153 | |
| 337 | PHE0000469 | 705 | yeast YKL091c | Saccharomyces | 110-1042 | ATP/ADP transporters |
| | | | | cerevisiae | | |
| 338 | PHE0000470 | 706 | corn Ssh1-like protein 1 | Zea mays | 57-1037 | ATP/ADP transporters |
| 339 | PHE0000471 | 707 | corn Ssh1-like protein 3 | Zea mays | 89-841 | ATP/ADP transporters |
| 340 | PHE0000472 | 708 | corn Ssh1-like protein 4 | Zea mays | 309-1196 | ATP/ADP transporters |
| 341 | PHE0000473 | 709 | soy Ssh1-like protein | Glycine max | 209-976 | ATP/ADP transporters |
| | | | 2 [ssh2] | | | |
| 342 | PHE0000017 | 710 | Zm-AAA1 - AAA | Zea mays | 184-2214 | AAA-type ATPase |
| | | | ATPase | | | |
| 343 | PHE0000018 | 711 | Zm-AAA2 - AAA | Zea mays | 104-2533 | AAA-type ATPase |
| | | | ATPase | | | |
| 344 | PHE0000395 | 712 | soy phantastica | Glycine max | 275-1345 | Plant architecture |
| 345 | PHE0000396 | 713 | soy phantastica 2 | Glycine max | 178-1260 | Plant architecture |
| 346 | PHE0000397 | 714 | maize rough sheath 1 | Zea mays | 92-1144 | Plant architecture |
| 347 | PHE0000398 | 715 | soy lg3-like 1 | Glycine max | 103-1026 | Plant architecture |
| 348 | PHE0000399 | 716 | soy rough sheath1- | Glycine max | 144-1076 | Plant architecture |
| | | | like 1 | | | |
| 349 | PHE0000401 | 717 | soy G1635-like 1 | Glycine max | 28-888 | Plant architecture |
| 350 | PHE0000411 | 718 | corn monosaccharide | Zea mays | 331-2565 | Carbohydrate |
| | | | transporter 2 | | | transporters |
| 351 | PHE0000412 | 719 | corn monosaccharide | Zea mays | 75-1643 | Carbohydrate |
| | | | transporter 1 | | | transporters |
| 352 | PHE0000413 | 720 | soy monosaccharide | Glycine max | 132-1685 | Carbohydrate |
| | | | transporter 3 | | | transporters |
| 353 | PHE0000414 | 721 | corn monosaccharide | Zea mays | 141-1670 | Carbohydrate |
| | | | transporter 3 | | | transporters |
| 354 | PHE0000415 | 722 | soy monosaccharide | Glycine max | 160-1899 | Carbohydrate |
| | | | transporter 1 | | | transporters |
| 355 | PHE0000416 | 723 | corn monosaccharide | Zea mays | 74-1690 | Carbohydrate |
| | | | transporter 6 | | | transporters |
| 356 | PHE0000418 | 724 | corn monosaccharide | Zea mays | 146-1744 | Carbohydrate |
| | | | transporter 4 | | | transporters |
| 357 | PHE0000419 | 725 | soy monosaccharide | Glycine max | 63-1505 | Carbohydrate |
| | | | transporter 2 | | | transporters |
| 358 | PHE0000420 | 726 | soy sucrose | Glycine max | 63-1595 | Carbohydrate |
| | | | transporter | | | transporters |
| 359 | PHE0000421 | 727 | corn sucrose | Zea mays | 76-1599 | Carbohydrate |
| | | | transporter 2 | | | transporters |
| 360 | PHE0000422 | 728 | corn monosaccharide | Zea mays | 201-1763 | Carbohydrate |
| | | | transporter 8 | | | transporters |
| 361 | PHE0000423 | 729 | corn monosaccharide | Zea mays | 93-1634 | Carbohydrate |
| | | | transporter 7 | | | transporters |
| 362 | PHE0000390 | 730 | rice chloroplastic | Oryza sativa | 136-1311 | Carbon assimilation |
| | | | sedoheptulose-1,7- | | | |
| | | | bisphosphatase | | | |
| 363 | PHE0000391 | 731 | rice cytosolic | Oryza sativa | 171-1187 | Carbon assimilation |
| | | | fructose-1,6- | | | |
| | | | bisphosphatase | | | |
| 364 | PHE0000392 | 732 | Wheat sedoheptulose- | Triticum | 14-1192 | Carbon assimilation |
| | | | 1,7-bisphosphatase | aestivum | | |
| 365 | PHE0000393 | 733 | dual function | Ralstonia | 80-1399 | Carbon assimilation |
| | | | SBPase/FBPase | eutropha | | |
| 366 | PHE0000394 | 734 | sedoheptulose-1,7- | Chlorella | 90-1238 | Carbon assimilation |
| | | | bisphosphatase | sorokiniana | | |
| 367 | PHE0000425 | 735 | soy isoflavone | Glycine max | 45-1607 | Flavonoids |
| | | | synthase | | | |
| 368 | PHE0000426 | 736 | soy ttg1-like 2 | Glycine max | 52-1059 | Flavonoids |

[0097] Details of the above listed strategies for crop improvement are provided below.

[0098] 1. Amino Acid Transporters

[0099] Free amino acids are the most important translocatable organic nitrogen forms in plants. Amino acid transporters are actively involved in amino acid movement from cell to cell and further to vascular tissues for long distance translocation. It is expected that genetic modification of the transporter activity in plants in a given tissue and stages of development may direct more translocation of free amino acids loaded into vascular bundle tissue from source tissues and further transport into sink tissues, such as developing vegetative tissues or seeds, for protein biosynthesis. Increased seed protein content may be expected by enhancing organic nitrogen that is loaded in the developing seeds.

[0100] Nucleic acid and polypeptide sequences for use in generation of transgenic crop plants having improved properties as described in the above strategy are provided in Table 1.

[0101] 2. Protection Against Osmotic Stress and/or Modification of Sugar Transport and/or Metabolism—ASH1/GCE1

[0102] Water stress is a major cause of crop loss. A screen was conducted to identify genes which, when overexpressed, protect Saccharomyces cerevisiae from high osmotic conditions. It is expected that these genes, when transferred to crop plants will confer resistance to water-stress conditions such as drought. Two genes from Arabidopsis thaliana, designated ASH1 and ASH2, for Arabidopsis Suppresor of hog1 (osmosensitive mutant) were identified in the S. cerevisiae screen. BLAST analysis reveals that ASH1 is closely related to MTN3, a member of a group of genes identified as induced by Rhizobium during root nodule development. ASH2 encodes a hypothetical protein of unknown function and contains an N-terminal domain motif (motif Y) that appears to be plant specific and is found in approximately 19 Arabidopsis proteins.

[0103] In an unrelated study, the Arabidopsis ASH1 gene was identified as being involved in carbon/nitrogen signaling. A number of Arabidopsis mutants that are insensitive to glucose inhibition of chlorophyll accumulation in the absence of nitrogen (GCE mutants) were identified. Such mutants develop green cotyledons and true leaves on nitrogen free 3% glucose only medium, while wild type plants under the same conditions develop purple cotyledons. In eight different glucose insensitive plants, the mutation responsible for the mutant phenotype, GCE1 mutation, was mapped to the same ASH1 gene identified in the above yeast osmosensitivity screen.

[0104] Bioinformatic analysis of ASH1/GCE1 reveals that it encodes a member of a relatively well conserved family of proteins represented in Arabidopsis by 16 family members. In addition, closely related homologs were identified in a number of plant species, including soy (Glycine max), rice (Oryza sativa), corn (Zea mays), cotton (Gossypium hirsutum), leek (Allium porrum) and wheat (Triticum aestivum). Analysis of the structure of the ASH1/GCE1 gene product indicates the presence of a number of transmembrane domains and regions of homology to known transporters, including sugar transporters and sodium:solute transporters. This evidence, in combination with the observed phenotypes and the report of the possible involvement of a related petunia gene, NEC1, in sugar metabolism or transport (Ge et al., 2000), indicate that ASH1/GCE1 may contribute to plant yield because of its roles in osmoprotection and carbon partitioning. Thus, expression of ASH1/GCE1 and/or its crop homologs in transgenic plants is expected to be useful for production of transgenic plants having protection against osmotic stress and/or improved yield as the result of altered sugar transport and/or metabolism.

[0105] Nucleic acid and polypeptide sequences for use in generation of transgenic crop plants having improved properties as described in the above strategy are provided in Table 1.

[0106] 3. Plant Steroid Biosynthesis Pathway and Signal Transduction Genes

[0107] Brassinosteroids are believed to be plant growth regulators. Over forty related brassinosteroid (BR) compounds have been identified in plant extracts (Clouse 1998). BR compounds have been shown to affect stem elongation (Clouse, 1998; Cutler, 1991), cell division,(Clouse, 1993) reproductive and vascular development (Kauschmann 1996), membrane polarization and proton pumping, source/sink relationships and modulation of stress (Artica, 1995; Mandava, 1988; Sakurai, 1997; Sasse; 1990).

[0108] Using ¹²⁵I-labeled BRs, it was demonstrated that BRs accumulate in the elongating zones of mung bean epicotyls and the apex of cucumber seedling (Xu, 1994). Both BR and auxin promote elongation. Synergisms and additive effects were observed when BRs were combined with auxins and gibberellins (Mandava, 1988) as measured by elongation. BR effects are inhibited by cytokinin, absiscic acid and ethylene as measured by BR-induced elongation. (Iwasaki, 1991; Sasse, 1990). Treatment with exogenous BR was shown to increase ethylene production in stem tissue (Arteca, 1995). The inhibitory effect of high concentrations of BR on expanding root cells was attributed to the overproduction of ethylene (Arteca, 1995). BR effects on elongation are accompanied by proton extrusion and hyperpolarization of cell membranes (Cao, 1995; Bajguz, 1996;Bloch 1983; Hartmann 1987).

[0109] An indirect induction of ATPase activity by BR may affect sucrose transport (Petzold, 1992). Goetz et al. (2000) reported a link between steroid signaling and carbohydrate metabolism. There was an increase in the activity of cell-wall-bound invertase in cell-suspension cultures treated with BR and an increased capacity for sugar uptake into cells.(Goetz, 2000).

[0110] Tobacco field trials with exogenously applied BR resulted in significantly greater biomass as well as significantly higher yield (Sairam, 1994). Plants treated with BR compounds have also been reported to have enhanced tolerance to both cold and heat. Membrane electrolyte leakage was reduced during chilling and there was a reduction in malondialdhyde content and superoxide dismutase activity (Patterson,1993). ATP and proline levels were shown to increase after applicatin of BRs (Wang, 1993). An application of BR increased thermotolerance in heat-stressed wheat and produced a change in the spectrum of heat shock proteins. Drought stress and salt stress were both ameliorated by treatment with BR (Sairman, 1994; Schuler, 1991; Singh, 1993; Takeuchi, 1992).

[0111] The biosynthetic pathway of BRs has been elucidated by feeding studies with radiolabeled precursors of brassinolide the most biologically active form of BR. BR mutants have been produced and primarily result in dwarf plants (Bach, 1997; Benveniste 1986; Campbell 1980; Choe 1999a & b; Crowley 1998; Gachotte 1995; Husselstein 1999; Klahre 1998; Lai 1994; Lees 1999; Ourisson 1994;)

[0112] BR-insensitive mutants were identified in Arabidopsis, pea and tomato. One such gene, BAS-1, is believed to regulate BR levels and light responsiveness in Arabidopsis. The BAS-1 gene was found to be the control point between cytochrome P450 photoreceptor systems and BR signal transduction. Seedlings with reduced BAS1 expression displayed reduced sensitivity to light and hyper-responsiveness to BR in a light dependent manner (Neff, 1999). The Arabidopsis receptor kinase BRI1 was identified as a leucine rich BR signal receptor (He 2000; Li, 1997; Schumacher, 2000) A mutant, designated FACKEL, was isolated from Arabidopsis that displayed distorted embryos, multiple shoot meristems and stunted roots. The mutant gene (FIC) was cloned and is similar to the yeast C-14 sterol reductase (Lorenz 1992; Marcireau 1992). The mutant could not be rescued by exogenously applied BR. The FIC gene product is believed to be required for cell division and expansion of the developing embryo (Farese 1998; Jang 2000; Schrick 2000). Identification of mutants with the above described phenotypes indicates rate limiting steps in steroid biosynthesis and signal pathways.

[0113] Disruption of the OsBR11 rice orthologue of BRI1, an LLR-kinase and putative brassinosteroid receptor (He et al., 2000; Friedrichsen et al., 2000), has demonstrated that OsBRI1 functions in various growth and developmental processes in rice, including (1) internode elongation, by inducing the formation of the intercalary meristem and the longitudinal elongation of internode cells; (2) bending of the lamina joint; and (3) skotomorphogenesis (Yamamuro et al., 2000).

[0114] It is expected that overexpressed levels of these genes in Zea mays L will result in plants with higher endogenous levels of plant steroids improving plant vigor, yield and stress tolerance.

[0115] Nucleic acid and polypeptide sequences for use in generation of transgenic crop plants having improved properties as described in the above strategy are provided in Table 1.

[0116] 4. Cyclin Dependent Kinase Activating Kinase

[0117] Overexpression of cyclins in plants has been shown to accelerate growth of A. thaliana without inducing neoplasia (Doerner et al., 1996; Cockcroft et al., 2000). This can bring about a number of potentially desirable phentotypic changes that may enhance crop productivity or grain composition. For example, longer roots may increase the ability of a plant to perform under conditions of limited water availability and increased leaf area may allow a plant to produce more grain or leaf mass. Increases in embryo size relative to endosperm mass can also bring about overall increases in grain oil content.

[0118] An alternative to overexpression of cyclins to bring about phenotypic changes in plants is the overexpression of cyclin dependant kinase activating kinases (CDK-activating kinases or CAKs). CDK-activating kinase is a complex of cdk7, cyclin H and MAT1 (menage a trois 1) and has been proposed to function in the control of cell cycle progression, DNA repair and RNA polymerase II transcription (Nigg, 1996). CAK exists in at least two distinct states in the cell; i.e., as a free complex and as a component of the RNA polymerase II general transcription factor TFIIH. CAK phosphorylates many substrates in vitro, including several CDKs, the general transcription factors TFIIE, TFIIF and TBP, and the carboxy-terminal domain of the largest subunit of RNA pol II (Morgan, 1995; Hoeijmakers et al., 1996; Nigg, 1996). Little is known about factors that goven substrate preference of CAK, but it does appear that specificity is modulated by association of CAK with MAT1 and TFIIH (Yankulov and Bentley, 1997).

[0119] CDK-activating kinase has been reported in plants, although many of the details surrounding the composition and role in the cell remain unclear. CAK in rice seems to act in a manner similar to that described in mammalian systems. A rice homologue of cdk7, R2, has been reported to complement a CAK mutation in yeast and phosphorylate the rice CDK (Cdc2Os1) and the carboxy-terminal domain (CTD) of the largest subunit of RNA polymerase II of Arabidopsis (Yamaguchi et al., 1998). This protein has also been shown to interact with rice cyclin H in a manner similar to that of mammalian cdk7 (Yamaguchi et al., 2000). R2 expression levels also appear to correlate with progression through G1 and S phase (Sauter, 1997; Lorbiecke and Sauter, 1999), although this link is not entirely clear (Umeda et al., 1999). In contrast to rice, an Arabidopsis CAK cloned by complementation in yeast is unrelated to the ckd7-like protein R2 and was also unable to phosphorylate the CTD of RNA polymerase II (Umeda et al., 1998), suggesting that activation of CDKs and RNA polymerase II transcription are separable in plants. Yeast appears to use an unrelated CAK called CAK1 (Kaldis et al., 1996; Kladis, 1999; Ross et al., 2000).

[0120] It is expected that alteration of expression of CAK transgenes in crop plants, particularly maize and maize grain, may increase plant resistance to abiotic stresses or alter the nutritional content of the grain.

[0121] Nucleic acid and polypeptide sequences for use in generation of transgenic crop plants having improved properties as described in the above strategy are provided in Table 1.

[0122] 5. Cercosporin Resistance

[0123] Cercospora zeae-maydis, the causative agent of grey leaf spot disease in maize, produces the toxin cercosporin. It is expected that methods of increasing tolerance of maize to cercosporin will increase plant resistance to gray leaf spot disease. The yeast gene, PDR5, is induced by cercosporin and encodes an ABC (ATP-Binding Casette) efflux pump involved in multiple drug resistance. The specific disruption of this pump is sufficient to confer hypersensitivity to cercosporin in yeast. It is expected that overexpression of the PDR5 gene in corn will result in resistance to grey-leaf spot disease in maize.

[0124] Nucleic acid and polypeptide sequences for use in generation of transgenic crop plants having improved properties as described in the above strategy are provided in Table 1.

[0125] 6. Chlorate/Nitrate Transport

[0126] The Arabidopsis gene, CHL1 (AtNRT1) encodes a nitrate transporter. The CHL1 gene product possesses dual-affinity properties for both the high-affinity and low-affinity transport systems within Arabidopsis roots.

[0127] It is well known that an increase in the amount of nitrogen made available to the plant correlates with an increase in the total amount of nitrogen measured within the plant. Ta and Weiland (1992) have reported that more nitrogen is specifically mobilized to the grain if nitrogen is provided in the soil later in development. It has been further reported (Reed et al.(1980)) that half of the nitrogen in the ear is accumulated prior to the remobilization of reduced nitrogen from the vegetative tissues. Since nitrogen transported into the ear is not from the remobilization of vegetative reduced nitrogen, it is believed that grain nitrogen is derived from nitrate stored within the plant or directly from nitrate uptake by the roots. Also, cob development is complete approximately 12 days after pollination, therefore most of the reduced nitrogen within the ear is partitioned to the grain after this time. Lastly, in some maize genotypes, the rate of nitrate uptake declines after approximately 30 days post-anthesis (Reed et al. 1980).

[0128] Expression of the CHL1 gene in maize may increase the level of nitrogen/nitrate in the plant during vegetative growth. This will provide the kernel with increased levels of reduced nitrogen as a result of the remobilization of vegetative reduced nitrogen. Furthermore, expression of CHL1 in maize may increase the rate of nitrate uptake during the first 30 days post-anthesis when the need for nitrate appears to be critical for grain-filling. Additionally, this approach could expand the window in which nitrate uptake occurs post-anthesis, primarily between 30 days post-anthesis through maturity. It is expected that this will provide more nitrate to the kernel during the entire grain-filling process. Photosynthetic activity may might also be preserved through the prolonged period of nitrogen uptake by delaying the re-mobilization of vegetative reduced nitrogen, thereby postponing senescence and allowing for the production of higher grain yields.

[0129] The CHL1 gene is expressed using the rice actin promoter in order to constitutively express CHL1 throughout the plant. The gene is also expressed with the root-specific maize rs81 promoter (U.S. Pat. No. 6,207,879) to provide for expression in the endodermal layer of the root. Lastly, the CHL1 is also expressed under control of a senescence-specific promoter to increase the level of nitrate/nitrogen within the plant and/or kernel during the grain-filling period.

[0130] A rice nitrate transporter, NTR1, has been functionally characterized (Lin et al, 2000). This gene is more similar in sequence to barley oligopeptide transporters than to the A. thaliana chlorate transporter. However, the rice transporter also has been shown to transport nitrate and not peptides in xenopus oocytes.

[0131] Nucleic acid and polypeptide sequences for use in generation of transgenic crop plants having improved properties as described in the above strategy are provided in Table 1.

[0132] 7. Siroheme Synthesis

[0133] cobA, cysG, and upm1 are examples of S-adenosyl-L-methionine-dependent uroporphyrinogen III (uro'gen) methyl transferases (SUMT) that produce bright red fluorescent porphyriniod compounds when overexpressed in E. coli, yeast, and CHO cells. This property enabled visual selection of transformed E. coli colonies (Rossner and Scott 1995) and automated sorting of transformed yeast and CHO cells (Wildt and Deuschle 1999). The fluorescence is the result of intracellular accumulation of di- and tri-methylated uro'gen (dihydrosirohydrochlorin and trimethylpyrorocorphin), both of which are compounds found in porphyrin synthesis pathways (i.e., chlorophyll and cobalamin).

[0134] The siroheme porphyrin is an essential prosthetic group in maize nitrate reductase and is also synthesized via this methylation (Sakakibara, Takei, and Sugiyama 1996). It is expected that expression of a gene involved in siroheme synthesis will contribute to enhanced nitrogen metabolism by a plant.

[0135] The first step in the biosynthesis of Uro'gen III is the dimerization of two molecules of alanine to give the pyrrole porphobilinogen. This molecule is acted upon by two enzymes, PBG-deaminase and Uro'gen III synthase, to give Uro'gen-III. Transmethylation of Uro'gen III by a SAM-dependent methyltransferase (MT) gives precorrin-2 (PC-2), which is subsequently converted into siroheme after dehydrogenation and ferrochelation. Trimethylpyrrocorphin is an overmethylated PC-2 derivative that accumulates in cells that overexpress Uro'gen-III methyltransferases.

[0136] Cells transformed with either cobA (from P. freudenreichii) or green fluorescent protein genes yield roughly equivalent fluorescent signals. With absorbance peaks at 384 nm and 500 nm along with an emission band at 605 nm, the fluorescent porphyriniods generated by the cobA uro'gen methyl transferase have a good spectral signature for detection in plant material. Excitation at either 384 or 500 nm avoids strong chlorophyll absorbance and the resulting red emission will be readily detected as it has a substantial Stokes shift (from the 500 nm absorbance origin) and yet does not overlap with chlorophyll autofluorescence in the far red (Haseloff, 1999) Red emitting markers are generally desirable since these signals have a lower autofluorescent background.

[0137] The carboxy terminus of the maize sumt (genbank D83391; Monsanto ZEAMA-04OCT00-CLUSTER29_{—}1), Arabidopsis upm1 (L47479), and E. coli cysG (X14202) are significantly homologous to the bacterial cobA genes of P. freudenreichii (U13043), A. nidulans (X70966), and P. denitrificans (M59236) (Sakakibara et al 1996). The E. coli cysG gene is multifunctional (producing enzymes for the subsequent porphyrin oxidation and Fe⁺² chelation steps) but the SUMT activity has been located to this same region of homology (Warren et al. 1994). Given that the cobA gene should not effect expression or activity of the endogenous maize SUMT (as needed for producing the siroheme required for nitrate reductase), the transformed marker uro'gen methyl transferase is derived from one of these or similar bacterial sources. Plant siroheme synthases have been reported to be localized in the chloroplast (Leustek et al., 1997), and therefore these genes are expressed with a chloroplast transit peptide.

[0138] It is expected that expression of cobA, cysG, and upm1 like proteins will provide useful fluorescent screenable markers in maize.

[0139] Nucleic acid and polypeptide sequences for use in generation of transgenic crop plants having improved properties as described in the above strategy are provided in Table 1.

[0140] 8. Cold Induced Genes

[0141] The inability of corn plants (Zea mays L.) to endure low temperatures and freezing is a major determinant of the geographical areas where the crop is grown. Even in climates considered suitable, crop failure or decreases in yield frequently occur due to cold temperatures. Injury to the plant's cell membrane is an important site of cold damage (Troyer, 1999).

[0142] Ice formation is initiated in the intercellular spaces of the plant's cells because the extracellular fluid has a higher freezing point or lower solute concentration than intracellular fluid. Unfrozen water moves from inside the cell to the intercellular spaces down the chemical potential gradient. The plasma membrane is damaged due to dehydration causing lysis, segregation of proteins within the membrane (phase transition), and fracture lesions. The cell's cold-induced production of reactive oxygen species contributes to the membrane damage (McKersie et al., 1997). At prolonged exposure to below freezing temperatures, intercellular ice can cause cell rupture (Olien and Smith, 1977).

[0143] Many plants acclimate to cold upon exposure to prolonged low nonfreezing temperatures because the expression of certain cold induced genes stabilize membranes against freeze-induced injury. Transforming Z. mays L. to overexpress these genes results in plants that are more cold tolerant.

[0144] It is believed that expression of genes involved in dessication tolerance in a plant may contribute to increased tolerance to chilling, freezing, dessication, water stress, or other abiotic stresses. Three classes of Late Embryogenic Abundant (LEA) proteins have been assigned based on structural similarities (see Dure et al., 1989). All three classes of LEAs have been demonstrated in maturing (i.e. desiccating) seeds. Within these 3 types of LEA proteins, the Type-II (dehydrin-type) have generally been implicated in drought and/or desiccation tolerance in vegetative plant parts (i.e. Mundy and Chua, 1988; Piatkowski et al., 1990; Yamaguchi-Shinozaki et al., 1992). Expression of a Type-III LEA (HVA-1) in tobacco was found to influence plant height, maturity and drought tolerance (Fitzpatrick, 1993). Expression of HVA1 in rice was shown to increase resistance to salt and water stress ( U.S. Pat. No. 5,981,842). Expression of genes from all three LEA groups may therefore confer drought tolerance in a transgenic plant.

[0145] Highly hydrophilic proteins such as the dehydrins have recently been found to play a role in water stress responses in a wide variety of eukaryotes and prokaryotes (Garay-Arroya et al., 2000). Garay-Arroya et al. developed an algorithm that identified all known plant LEA proteins (except for the glycine poor group 5 LEAs). This algorithm also identified hydrophilic LEA-like proteins in yeast and E. coli. Eight of the 12 yeast genes they identified were also shown to be induced by osmotic stress. Given the reported osmotic and temperature stress resistances associated with overexpression of LEA and COR genes, it seems plausible that overexpression of these microbial genes in corn may improve corn's response to cold or drought stress. Five genes from yeast are overexpressed in corn.

[0146] A total of 65 putative dehydrins were identified. Sequence analysis showed that these proteins fell into 6 or 7 distinct groups. Based on this analysis, five additional dehydrins have been selected for overexpression in maize in order to improve tolerance to drought or cold temperatures.

[0147] In addition, several group 3 LEA proteins are introduced into maize including barley HVA1 (X78205), a maize LEA3 protein (fC-zmenLIB3061034Q1K1C6-FLI), and the maize group 1 LEA protein EMB5 (700623908_FLI)

[0148] Nucleic acid and polypeptide sequences for use in generation of transgenic crop plants having improved properties as described in the above strategy are provided in Table 1.

[0149] 9. Corn Cyclins

[0150] Cyclins play a key regulatory role in passage of cells through the cell cycle. Interaction of a cyclin with a cyclin-dependent kinase (CDK) activates the kinase, resulting in the specific phosphorylation of other molecules and advancement of the cell cycle. Degradation sequences within the protein free the CDK for association with another cyclin. There are several different classes of cyclins, with synthesis and degradation regulated such that the availability of a particular cyclin is restricted to a particular phase of the cell cycle. In plants, three classes of cyclins have been identified: cycA, cycB, and cycD.

[0151] Three reports examine the consequences of ectopic cyclin expression on plant growth. Doerner et al. (1996) generated Arabidopsis plants expressing Arabidopsis cycB1 in roots. In the roots of normal plants this cyclin is expressed in the meristem, with transcripts accumulating prior to cytokinesis and declining once cell division has occurred. CycB1 is also induced by exogenous treatment with IAA. Transgenic plants containing a cylcin B1 gene driven by the Arabidopsis cdc2a promoter exhibited an increase in root growth rate. Increased growth rate was due to an increase in cell number rather than cell size, and the overall morphology of the roots was normal. Cockcroft et al (2000) examined the consequences of expressing Arabidopsis cycD2 driven by the 35S promoter in transgenic tobacco plants. Plants expressing the Arabidopsis protein were similar in appearance to wild type plants, but had an increased growth rate, reaching the flowering stage 9-14 days earlier than non-transgenic plants. Examination of vegetative meristems indicated normal cell organization but an increased rate of leaf primordia initiation due to a more rapid rate of cell division. In contrast, overexpression of a cytokinin-regulated cyclin, Arabidopsis cycD3, in transgenic plants resulted in disorganized meristems, an abnormal appearance, and delayed flowering (Riou-Khamlichi et al., 1999). Unlike callus from wild type plants, callus generated from the cycD3 expressing transgenic plants was able to thrive in the absence of exogenous cytokinin, suggesting that for certain processes cycD3 is a component of a cytokinin response pathway.

[0152] The variable results of constitutive cycD expression reported in the literature may be due to different roles played by the cycDs tested, or may be due to unidentified experimental differences. Corn cycD genes are tested for the consequences of their constitutive expression in corn. cycD2-like genes are preferably expressed in plants. A cycD gene from rice is also introduced into maize. That gene is be placed under the regulation of an endosperm-specific promoter, with the specific goal of enhancing cell division in the seed. PCT publications WO 98/42851 and WO 00/17364 disclose altering the expression of cycD in plants to modulate plant growth.

[0153] Yield is impacted in cyclin overexpressers by a variety of means, including early flowering, improved establishment, increased root mass, or increased seed mass. The key desired phenotype is normal morphology but enlargement of selected organs (roots, ears) or increased growth rate resulting in improved yield. Other assays include yield and altered growth rate or developmental pattern

[0154] Nucleic acid and polypeptide sequences for use in generation of transgenic crop plants having improved properties as described in the above strategy are provided in Table 1.

[0155] 10. Cytokinins

[0156] Cytokinins promote and sustain plant cell division (Riou-Khamlichi et al., 1999), modulate developmental processes such as apical dominance (Napoli et al., 1999) and senescence (Gan and Amasino, 1995), play a role in nitrogen (Yu et al, 1998) and carbon (Miyazawa et al., 1999) metabolism and interact with most other phytohormone signaling pathways (Cary et al., 1995; Kusnetsov et al., 1998; Miyazawa et al., 1999). Manipulation of cytokinin levels or signaling pathways can thus be expected to improve yield by increasing kernel cell numbers, delaying senescence, increasing the number of ears a corn plant sets, antagonizing abscisic acid signaling, improving nitrogen use efficiency or increasing carbon flow into amyloplasts. However, the diverse roles that cytokinins play in plant growth and development also suggest that temporal and spatial control will be required to manipulate cytokinin signaling for plant improvement.

[0157] Enhancement of cytokinin activity in early embryos and/or endosperm can be predicted to have a number of effects that will lead to increases in corn yield. Cytokinin-mediated cell division may increase overall yield by increasing endosperm and/or embryo size. A rapid increase in cell number driven by increased cytokinin activity may also lead to an earlier establishment of newly fertilized kernels as strong sinks. Sink strength might also be enhanced by increasing the rate at which amyloplasts acumulate starch. Increased cytokinin activity is expected to block kernel abortion either through antagonism of abscisic acid or sucrose signals associated with low water potentials (Cheikh and Jones, 1994; Ikeda et al., 1999; Zinselmeier et al., 1999) or through the increases in sink strength mentioned above.

[0158] Grain quality may be altered through either of two methods. Enhanced nitrogen accumulation or use may occur due to cytokinin induction of nitrate reductase. This may lead to an increase in grain protein levels or improved performance under water limiting conditions where nitrate reductase activity is reduced (Foyer et al., 1998). Increased starch content or altered grain carbon distribution could also occurr due to cytokinin induction of amyloplast starch accumulation, ADP-glucose pyrophosphorylase, starch synthase or starch branching enzymes (Miyazawa et al., 1999).

[0159] Increases in cytokinin levels have been shown to reduce apical dominance and delay senescence in tobacco plants engineered to conditionally overexpress a cytokinin synthase (Gan and Amasino, 1995; Faise et al., 1997; McKenzie et al., 1998). This indicates that altered cytokinin activity could be used to increase yield by promoting the growth of multiple ears per plant or prolonging the fill period prior to grain dry down. It has also been reported that senescence is delayed in tobacco by expressing an upstream activator of cytokinin biosynthesis, knotted1 (Ori et al., 1999).

[0160] Cytokinin activity can be manipulated in several different manners. Cytokinin levels can be elevated by increasing cytokinin production, increasing the rate of zeatin release from less active O-glycosyl derivatives, decreasing the rate of degradation, decreaseing the rate of inactivation by glycosylation or altering transport of the molecule. Alternatively, cytokinin signaling can by manipulated by overexpression of putative receptors, and upstream or downstream signaling components. A list of genes involved in cytokinin activity is provided below.

Genes Related to Cytokinin Biosynthesis and Activity

| Gene | Accession | Function | Source | Reference |
|---|---|---|---|---|
| Isopentyl transferase | AB025109 | cytokinin | A. tumefaciens | Ebinuma et al., |
| (ipt) | | biosynthesis | | 1997 |
| Beta-glucosidase (Zm- | CAA52293 | cytokinin-beta- | Z. mays | Brzobohaty et al., |
| p60) | | glucosidase | | 1993 |
| Cytokinin oxidase | AAC27500 | cytokinin | Z. mays | Morris et al., 1999 |
| (CKO) | | degradation | | |
| zeatin O- | AF116858 | Cytokinin | P. vulgaris | Martin et al., 1999a |
| xylosyltransferase | | inactivation | | |
| (ZOX) | | | | |
| zeatin O- | AAD04166 | Cytokinin | P. lunatus | Martin et al., 1999b |
| glucosyltransferase | | inactivation | | |
| (ZOG) | | | | |
| Purine permease1 | AAF64547 | Cytokinin | A. thaliana | Gillissen et al., |
| (PUP1) | | transporter | | 2000 |
| Cytokinin independent | BAA13416 | Histidine kinase | A. thaliana | Kakimoto, 1996 |
| 1 (CKI1) | | | | |
| G-protein coupled | U95142 | G protein | A. thaliana | Plakidou-Dymock |
| receptor 1 (GCR1) | | coupled receptor | | et al., 1998 |
| Cyclin D3 (CycD3) | T05420 | Cyclin D3 | A. thaliana | Riou-Khamlichi et |
| | | | | al., 1999 |
| Knotted1 (KN1) | S14283 | Homeobox TF | Z. mays | Ori et al., 1999 |

[0161] Expression patterns may be varied when alteration of cytokinin activity is to be used to enhance crop performance. Constitutive overexpression of A. tumefaciens iospentyl transferase (ipt) was reported to lead to a variety undesirable effects including decreased root production, shoots that fail to elongate, and small rounded leaves (McKenzie et al., 1998). In contrast, expression of ipt driven by a senescence specific promoter has been shown to significantly delay senescence without inducing other deleterious phenotypes (Gan and Amasino, 1995).

[0162] It is expected that the effects of altered cytokinin activity will depend on the tissue specificity and developmental timing of gene expression. Expression in the endosperm early in development should drive increases in cell number, alterations in carbon metabolism and increase sink strength. For example, the basal endosperm transfer layer promoter (bet1) is expressed in the basal endosperm transfer layer between day 9 and day 25 post-pollination (Hueros et al., 1995). The window of bet1 promoter activity corresponds roughly with a normal spike in cytokinin level seen in kernel development (Cheik and Jones, 1994). Two additional genes are known to be expressed specifically early in kernel development. The Esr genes are expressed between 4 and 7 days post-pollination in a region surrounding the embyro (Opsahl-Ferstad et al., 1997; Bonello et al., 2000) and discolored-1 (dsc1) is also expressed over the same time point (Scanlon and Myers, 1998). Expression patterns for dsc1 have not been reported, but dsc1 is known to be essential for both endosperm development and embryo development independent of the endosperm suggesting that it is expressed in both the embryo and endosperm. Senescence-induced promoters have been identified in A. thaliana, but none are currently known in maize (Weaver et al., 1998).

[0163] Isopentyl transferase (ipt) is one of many related bacterial genes that catalyze cytokinin biosynthesis from AMP and delta-2-isopentenyl pyrophosphate (McGaw, 1987). Ipt genes have been isolated from many bacterial species including Agrobacterium tumefaciens (GenBank Accession No. AB025109), A. vitis (GenBank Accession No. AAB41870), A. rhizogenes (GenBank Accession No. P14011), Ralstonia solanacearum (GenBank Accession No. P14333), Erwinia herbicola (GenBank Accession No. Q47851), Pseudomonas syringae (GenBank Accession No. P06619) and Anabaena PCC7120 (GenBank Accession No. CAB44665). The ipt gene is directly tested for the ability to improve yield under both normal and stress conditions with the bet1 promoter.

[0164] Beta-glucosidase (Zm-p60 or Glu1) is a gene that has been reported to cleave less active cytokinin-O-glucosides and kinetin-N3-glucoside to release active cytokinin (Brzobohaty et al., 1993). However, maize beta-glucosidase has also been reported to hydrolyze a broad range of glycoconjugates making it possible that additional effects would be observed from overexpression of maize beta-glucosidase (Cicek, 2000).

[0165] Zeatin O-xylosyltransferase (zox1) and zeatin O-glucosyltransferase (zog1) utilize UDPX or UDPG as sugar donors and catalyze the formation of O-xylosylzeatin or O-glucosylzeatin from zeatin. These compounds are thought to be less active storage or possibly transport cytokinin forms (Martin et al., 1999a and 1999b). The two proteins (ZOX1 and ZOG1) are highly related sharing 86.6% identity over 449 amino acids. Inactivation or inhibition of zeatin O-transferases could result in an increase in available cytokinins.

[0166] Purine permase 1 (AtPUP1) is a newly identified member of a 15 member gene family of transporters in A. thaliana (Gillissen et al., 2000). AtPUP1 has been demonstrated to be an energy dependent transporter of adenine. Competitive inhibition of adenine uptake by cytosine, hypoxantine, kinetin, zeatin and caffeine suggests that it may also be able to transport these substances. However the gene is not expressed in roots, which are thought to transport cytokinins to the shoots. No clear physiological role has been demonstrated for any member of the purine permease gene family and it is not clear that AtPUP1 is an endogenous cytokinin permease. Cytokinin permease overexpressing plants are expected to share some phenotypes with ipt overexpressing transformants, but may also appear to have cytokinin deficiencies.

[0167] Cytokinin independent 1 (CKI1) was identified in a screen of an A. thaliana TDNA mutant collection for cytokinin independent development on media lacking cytokinins. The protein was found to be a histidine kinase with a typical bacterial receiver domain. A. thaliana callus transformed with CKI1 driven by a 35S promoter was able to develop without addition of exogenous cytokinins (Kakimoto, 1996).

[0168] G-protein coupled receptor 1 (GCR1) is a member of the seven transmembrane receptor superfamily most closely related to D. discoideum cAMP receptors. Anti-sense suppression of GCR1 leads to decreased root and shoot sensitivity to cytokinins (Plakidou-Dymock et al., 1998). It has been suggested that GCR1 acts as a cytokinin receptor.

[0169] Cyclin D3 is thought to mediate cytokinin stimulation of cell division. A. thaliana seedlings treated with zeatin were found to accumulate transcripts of the D-type cyclin CycD3 as did the A. thaliana mutants amp1 and pt, both of which have elevated cytokinin levels. Overexpression of CycD3 in adult A. thaliana plants led to leaf curling, increased leaf number, late flowering and delayed senescence. In addition, callus derived from these lines was able to grow independently of cytokinins. None of the cycD3 transgenic lines accumulated cytokinins, consistant with a downstream role for cycD3 (Riou-Karnlichi et al., 1999).

[0170] D-type cyclins have been identified in corn, sorghum and rice. Both the corn and sorghum genes appear to be more closely related to A. thaliana CycD2 than CycD3. However the rice cyclin (GenBank Accession No. OJ990727_{—}05.9A26.C3) is most similar to A. thaliana CycD3. Additional cyclin D3-like genes have been reported from many different dicots including Nicotiana tabacum (GenBank Accession No. ABO 15222), Lycopersicon esculentum (GenBank Accession No. AJ002589), Pisum sativum (GenBank Accession No. AB008188), Medicago sativa (GenBank Accession No. AJ132929) and Antirrhinum majus (GenBank Accession No. AJ250398).

[0171] Knotted 1 (kn1) is a maize transcription factor of the homeobox family. Ectopic expression of kn1 in maize results in a non-cell autonomous alteration in cell fate determination (Vollbrecht et al., 1991). Overexpression of the protein in tobacco results in phenotypes resembling ipt overexpression (Sinha et al., 1993; Ori et al., 1999), e.g., development of meristems on vegetative and inflorescence tissues (Williams-Carrier et al., 1997). The similarities in phenotype between plants ectopically expressing kn1 and ipt have lead to the suggestion that kn1 is acting to promote cytokinin activity. Similar phenotypes have also been observed with plants overexpressing A. thaliana kn1-like protein suggesting that different knotted-like proteins will have similar effects (Lincoln et al., 1994). Overexpression of kn-1 in barley, however, did not lead to development of vegetative meritems on leaves, suggesting that leaf cells of dictos retain a more flexible, less determined state, and therefore, react to signals differently.

[0172] Nucleic acid and polypeptide sequences for use in generation of transgenic crop plants having improved properties as described in the above strategy are provided in Table 1.

[0173] 11. Alteration of Oil Content by Affecting Embryo Size

[0174] Corn oil occurs mainly in the cells of the scutellum portion of the embryo (Watson 1987, Weber 1987). Consistent with this distribution pattern is the fact that commercially available high oil corn varieites usually have a larger than normal embryo size (Roth 1998). Scutellum usually occupies more than 90% of the dry weight of the maize embryo (Watson 1987). It is anticipated that by enlarging the size of scutellum, the oil content of the corn kernel could be increased.

[0175] A number of maize embryo mutants have been characterized (Clark and Sheridan 1991; Sheridan and Clark 1993). However, the genetic element(s) responsible for those phenotypes is known for few of them. A 3.8 kb genomic fragment was isolated from a maize kernel mutant named dsc1 via Mutator tagging (Scanlon and Myers, 1998). dsc1 displays reduced endosperm size. Embryo growth in homozygous dsc1 kernels was found to be delayed, but proceeds normally to stage 1 in which the scutellum, coleoptile and shoot apex are clearly defined. Compared with the wild type kernels, the size of scutellum in dsc1 mutants was greatly reduced. Embryo growth stopped after stage 1 and embryonic tissues degraded.

[0176] The 3.8 kb genomic fragment was cloned and sequenced (Scanlon and Myers 1998). This fragment was shown to co-segregate with the mutant phenotype. It was further determined that this fragment is part of the maize gene responsible for the mutant phenotype and not a sequence closely linked to that locus. Northern blot assay revealed that dsc1 is expressed from 5 to 7 days after pollination (Scanlon and Myers 1998). Genetic analysis showed that the product of dsc1 plays an essential function in the development of the embryo and endosperm, and that dsc1 function is necessary for embryo development beyond stage 1 (Scanlon and Myers 1998). It is believed that overexpression of dsc1 in maize during embryo development will increase the size of the scutellum and the oil content.

[0177] A maize DNA sequence was identified by BLAST searching of a Monsanto proprietary database with the dsc1 DNA sequence. The identified sequence encodes a protein that is related to barley nucellin, an aspartic protease-like protein that may be involved in cell death in the nucellus of barley (Chen and Foolad, 1997). This suggests that dsc1 may encode an aspartic protease-like protein that may play a similar role in corn. This class of proteins is also related to tobacco CND41, a chloroplast localized protease with DNA-binding activity that has been suggested to play a role in regulation of gene expression in the chloroplast (Nakano et al., 1997; Murakami et al., 2000).

[0178] Nucleic acid and polypeptide sequences for use in generation of transgenic crop plants having improved properties as described in the above strategy are provided in Table 1.

[0179] 12. Cell Cycle Regulation by E2F

[0180] The retinoblastoma gene was one of the first tumor suppressor genes to be identified in mammals. The Rb tumor suppressor gene functions as a negative regulator of cell proliferation and normally acts to inhibit unregulated cell division in mammalian cells. Unlike mammalian cells, little is known how plants regulate G1 progression (Ach et al. 1997). cDNAs have been isolated in maize that encode Rb-related proteins and have been shown to be highly expressed in the shoot apex (Ach et al. 1997). The Rb-like proteins have been shown to interact with type D-Cyclins (Ach et al. 1997), are a family of proteins that regulate the activity of cyclin dependant kinases (CDK; Riou-Khamlichi et al. 1999) and control progression through the cell cycle (Cooper, 1995). It is suggested that G1 regulation in plant cells is controlled by mechanisms similar to the ones found in mammalian cells (Ach et al. 1997). The presence of CDKs and other cyclins suggest that the mechanism for regulation has been conserved in eukaryotic evolution (Ach et al. 1997). Recent evidence suggests that G1 regulation in plants involves Rb-related proteins. Rb has also been shown to interact with other proteins such as the wheat dwarf virus C1 protein (Xie et al. 1995). Inactivation of the Rb-related proteins either contitutively or at specific times in development is expected to increase cell division rates, resulting in bigger plants, higher yields, increased turgor and a higher degree of seed set in times of water stress.

[0181] Association of Rb with E2F is central to cell cycle regulation in animal cells (Ramirez-Parra et al. 1999). E2F is a family of transcription factors that is regulated by the formation of complexes with Rb proteins. E2F activates genes involved in cell proliferation and division, the activity of which is thought to induce expression of genes involved in DNA metabolism and cell cycle progression. The E2F transcription factor is overexpressed transgenically in order to increase transcription of cell cycle related genes at a higher rate. E2F transcription factors have been isolated from several plant species; Daucus. carota (GenBank Accession No. AJ251585), Triticum sp. (GenBank Accession No., GenBank Accession No. AJ238590) and Oryza sativa (GenBank Accession No. AB041725). Plant E2F proteins have been shown to be expressed in proliferating cells (Albani et al. 2000, Ramirez-Parra et al. 1999). The E2F protein was also shown to be induced during the G₁/S transition of the cell cycle (Albani et al. 2000). High levels of constitutive expression of the E2F transcription factor is expected to initiate transcription of cell cycle progression genes.

[0182] DP proteins have been demonstrated to form heterodimers with E2F and promote binding of E2F to DNA (Helin et al, 1993; Ramirez-Parra and Gutierrez, 2000). The specific subunit composition of the E2F/DP heterodimer appears to affect binding site selectivity and will likely alter the resulting group of genes induced (Tao et al, 1997). Overexpression of specific DP proteins may produce similar effects to overexpression of E2Fs and can potentially lead to improvements in crop performance. Effects of E2F and DP overexpression are reported to vary widely depending upon the specific protein isoforms and cell types involved (Chen et al., 2000).

[0183] Nucleic acid and polypeptide sequences for use in generation of transgenic crop plants having improved properties as described in the above strategy are provided in Table 1.

[0184] 13. Reduction of Senescence

[0185] Senescence is associated with at least two agronomically important stages of corn development, i.e., leaf senescence and endosperm development (Young and Gallie, 2000). Delayed leaf senescence or stay green is associated with longer grain filling periods and increased kernel weight (Prioul, 1992). Delaying endosperm senescence may have the affect of increasing grain weight or quality by increasing endosperm size or cell number.

[0186] Eukaryotic initiation factor 5A (eIF-5A) transcripts have been shown to accumulate in unfertilized egg cells in maize (Dresselhaus, 1999) and may play a role in cell growth or division upon fertilization. eIF-5A was originally isolated as a putative translation factor from a polyribosome-bound fraction (Kemper et al., 1976; Benne et al., 1978) and was suggested to be involved in the formation of the first peptide bond. Subsequent studies, however, indicated that translational initiation is not directly affected by a loss of eIF-5A function (Kang and Hershey, 1994; Zuk and Jacobson, 1998) and that eIF-5A is not required to assemble translation initiation complexes. Translation initiation factors are usually present substoichiometrically to ribosomes and associate with them only during initiation. In contrast, eIF-5A is present in excess over ribosomes (Hershey, 1-994) and largely bound to cytoplasmic, puromycin-sensitive structures that might represent rough endoplasmic reticulum-bound polysomes (Shi et al., 1997). Therefore, if eIF-5A functions in translation, it is probably at some step subsequent to initiation.

[0187] EIF-5A is activated by a post-translational modification of a specific lysine residue to hypusine (N-(4-amino-2-hydroxybutyl)lysine) in an enzyme-catalyzed two-step mechanism (Park et al., 1993; 1997). In the first step, the aminobutyl moiety of the polyamine spermidine is transferred by deoxyhypusine synthase (EC 1.1.1.249) in an NAD+-dependent reaction to the epsilon-amino group of a specific lysine residue in the EIF-5A precursor protein to form deoxyhypusine. In the second step, deoxyhypusine hydroxylase (EC 1.14.99.29) catalyzes the hydroxylation of the deoxyhypusine residue to hypusine. Activated EIF-5A is the only protein in which the unusual amino acid hypusine has been detected to date.

[0188] The hypusine modification of eIF-5A is conserved in all organisms studied to date and is required for cell growth. However, the presence of high levels of hypusine-modified eIF-5A is associated with high levels of cell division both during development and in human cancers (Chen et al., 1997b). The build up of unmodified eIF-5A is associated with senescence in animal systems (Chen et al., 1997a). Inhibitors of hypusine modification have been used to show that there is a direct link between eIF-5A modification state and cell cycle (Hanauske-Abel et al., 1994; Park et al., 1997). This active role played by eIF-5A in cell growth and senescence suggests that modification of the activity state of eIF-5A may be used to enhance agronomically important traits such as kernel growth rates and stay green.

[0189] Deoxyhypusine synthase has been cloned from tobacco and Senecio vernalis (Ober and Hartmann (1999a, b)). Both of the tobacco and S. vernalis enzymes are able to efficiently aminobutylate putrescine to form homospermidine. Homospermidine is the first pathway-specific intermediate in the synthesis of pyrrolizidine alkaloids. However, homospermidine is synthesized by homospermidine synthase, an enzyme thought to have evolved from deoxyhypusine synthase, in plants that contain pyrrolizidine alkaloids. The role of homospermidine in other plants in unclear.

[0190] Elevated putrescine levels have been associated with induction of apoptosis in mammalian cells (Tome et al., 1997) and cells selected for growth on ornithine decarboxylase inhibitors accumulate more eIF-5A (Tome et al., 1996). This has lead to the suggestion that variations in spermidine levels may lead to alterations in eIF-5A activity. This suggestion is supported by the observation that many cancer cells overexpress ornithine decarboxylase and S-adenosylmethionine decarboxylase (Ravanko et al., 2000).

[0191] Expression of ornithine decarboxylase is highly regulated in eukaryotic cells. The protein is inhibited by a specific antizyme that can only be translated when high levels of polyamines allow frameshifting (Matsufuji et al., 1990). The activity of the antizyme is, in turn inhibited by an antizyme inhibitor (Murakami et al., 1996). Forced expression of the antizyme has been shown to inactivate ornithine decarboxylase and suppress cellular polyamine levels (Murakami et al., 1994).

[0192] Increasing spermidine levels by overexpression of ornithine decarboxylase or S-adenomethionine decarboxylase may alter cellular growth patterns and retard senescence, possibly by increasing the levels of hypusine-modified eIF-5A. This same effect might also be achived by overexpressing the ornithine decarboxylase antizyme inhibitor.

[0193] eIF-5A appears to be an RNA-binding protein (Liu et al., 1997), and probably the hypusine modification and the C-terminal domain contribute to the interaction (Liu et al., 1997; Kim et al., 1998; Peat et al., 1998). Although it is not yet know with which RNAs eIF-5A interacts, it is possibile that eIF-5A functions as an export adapter for these RNAs. However, assuming that the essential function of elF-5A is conserved between eukaryotes and archaea, and given that archaea have no nuclei, it is possible that nuclear export of other macromolecules is not the primary function of eIF-5A. Furthermore, if eIF-5A was an export adapter, then it is expected that it would be actively imported into nuclei. However, nuclear accumulation of eIF-5A appears to occur solely by passive diffusion, as it is insensitive to reagents that block facilitated nuclear import. In addition, the hypusine modification is essential for eIF-5A function, probably involved in the interaction with its functional targets, and required for the RNA-binding activity of eIF-5A. Hypusine is also involved in the interaction with exportin 4 (Exp4). It is not known whether the hypusine in an eIF-5A-Exp4-complex is still available for RNA binding and export. Nucleocytoplasmic transport was reviewed by Mattaj and Englemeier (1998).

[0194] The eIF-5A protein shuttles between the nucleous and the cytoplasm in a hypusine-dependant manner. eIF-5A interacts with another nucleocytoplasmic shuttle protein, L5. This transport appears to be mediated by a specific export protein, exportin 4 (EXP4). L5 is an RNA binding protein that interacts with 5S RNA and modulates transport and assembly of the 60S ribosome particle. eIF-5A is also an RNA binding protein. Together, this suggests that one of the functions of eIF-5A may be to modulate the rate of 5S RNA assembly into 60S ribosome particles. Accumulation of unmodified eIF-5A would lead to accumulation of eIF-5A and it's putative cargo in the nucleus. However, it is also likely that eIF-5A interacts with additional proteins and RNAs.

[0195] eIF-5A is exported from the nucleus by a specific exporter, exportin 4 (Lipowsky et al., 2000). Exportin 4 is the most distant family member of the exportin protein identified so far. Nevertheless, it functions according to the same principles as the other exportins i.e. it binds its export cargo preferentially in a nuclear environment in the presence of RanGTP, forming a trimeric eIF-5A-Exp4-RanGTP export complex. This complex is subsequently transferred out of the nucleus. Cytoplasmic disassembly of the complex and concomitant cargo release are brought about by the concerted action of RanGAP and RanBP1 (or RanBP2, respectively), and also result in the hydrolysis of the Ran-bound GTP. The ‘empty’ exportin can then re-enter the nucleus and participate in another round of export.

[0196] The hypusine modification is apparently part of the signal that allows eIF-5A to access the Exp4 pathway. Recombinant eIF-5A that lacks the modification binds to Exp4 35 times more weakly than the fully modified protein, i.e. the recognition of the modification appears to contribute ˜8 KJ/mol binding energy. Deoxyhypusine can partially, but not fully, substitute for hypusine, indicating that the hydroxyl moiety of hypusine also contributes to Exp4 binding.

[0197] Exp4 may mask hypusine and other crucial parts of the eIF-5A molecule in order to prevent an interaction of eIF-5A with potential targets in the nucleus. Thus, eIF-5A might be actively exported from nuclei, not because it is a transporter for other macromolecules, but instead because its function is restricted to the cytoplasm. The available data is consistent with eIF-5A being involved in some aspect of translation or cytoplasmic degradation of mRNA or with eIF-5A functioning as an RNA chaperonin or in some other facet of RNA metabolism. eIF-5A accumulates in the absence of Exp4 in nucleoli, the sites where ribosomes are assembled. Untimely binding of eIF-5A to pre-ribosomal particles may interfere with ribosome biogenesis. Exp4-mediated export of eIF-5A would ameliorate such an effect.

[0198] L5 is a nucleocytoplasmic shuttle protein that is involved in the intracellular transport of 5 S rRNA (Steitz et al., 1988; Guddat et al., 1990; Rudt and Pieler, 1996). After transcription, 5 S rRNA transiently binds the La antigen, a 50-kDa protein that acts in the termination of polymerase III transcripts, in the nucleus (Rinke and Steitz, 1982; Gottlieb and Steitz, 1989). Furthermore, in the nucleus, 5 S rRNA also binds either its own transcription factor IIIA or ribosomal protein L5, forming 7 or 5 S ribonucleoprotein particles, respectively. In particular, it has been suggested that the 5 S rRNA·L5 complex (5 S ribonucleoprotein particle) acts as a precursor to ribosome assembly by delivering 5 S rRNA from the nucleoplasm to the nucleolar assembly site of 60 S ribosomal subunits (Steitz et al., 1988). Studies in Xenopus oocytes have shown that 5 S rRNA can be exported from the nucleus to the cytoplasm for subsequent accumulation at distinct cytoplasmic storage sites by either transcription factor IIIA or L5 (Guddat et al., 1990, Allison et al., 1995). As a consequence of increased ribosomal subunit synthesis, stored 5 S rRNA must be reimported from the cytoplasm into the oocyte nucleus. In contrast to nuclear export, however, the nuclear import of 5 S rRNA appears to be exclusively mediated by L5 protein (Allison et al., 1991; Rudt and Pieler, 1996). Although cytoplasmic storage sites for 5 S rRNA have not been observed in mammalian cells, the data so far raised in Xenopus oocytes demonstrated that L5 protein is an intracellular 5 S rRNA transport factor.

[0199] The network of nucleic acid-protein interactions involving TFIIIA, L5, 5 S rRNA, and the 5 S rRNA gene suggests a model in which 5 S rRNA synthesis is coupled to the accumulation of the L5 ribosomal protein. In the proposed regulatory loop, an increase in the concentration of L5 would result in displacement of the equilibrium between each of the relevant RNPs (5 and 7 S) and its constituent components in opposite directions, resulting in the formation of additional 5 S RNP and the release of free TFIIIA from 7 S RNPs. The TFIIIA released from 7 S RNPs would be available for binding to and nucleating transcription complex formation on additional 5 S rRNA genes. Thus, 5 S rRNA synthesis would be responsive to levels of L5 expression, even though there is no reason to believe L5 is directly involved in 5 S rRNA synthesis in any way (Pittman et al., 1999).

[0200] eIF-5A has been shown to directly interact with ribosomal protein L5 and both proteins are required for export of the HIV rev protein (Schatz et al., 1998). L5 has also been shown to interact with mdm2 (Marechal et al., 1994). Mdm2 interacts with p53 to inactivate the protein and promote tumor growth in mammalian cells (Momand et al., 1992). This suggests that eIF-5A and L5 may also interact to modulate in the export or assembly of 5S RNA into 60S ribosomal subunits.

[0201] The three dimensional structures of eIF-5A from two archaea species have been elucidated using X-ray crystallography (Kim et al., 1998; Peat et al., 1998). They show eIF-5A to be composed of two compact domains that are linked by a flexible hinge. N-terminal domain I contains the hypusine modification site in an extended, protruding and highly conserved loop. The modification is unlikely to have a major effect on the eIF-5A structure. Instead, its absolute conservation indicates that the hypusine mediates essential interactions with other macromolecules. Hypusine is a 2-fold positively charged amino acid and resembles nucleic acid-binding polyamines such as spermine and spermidine. Domain II is similar to the RNA-binding motif found in the prokaryotic cold shock protein CspA, which has been suggested to function as an RNA chaperone (Jiang et al., 1997). Domain II and the hypusine-containing loop from domain I may thus constitute a bipartite RNA-binding site (Kim et al., 1998; Peat et al., 1998). An RNA-binding activity of eIF-5A was detected in vitro and was found to depend on the hypusine modification (Liu et al., 1997). However, it is still unclear whether this RNA-binding activity reflects a genuine function of eIF-5A and if so what the physiological RNA ligand(s) of eIF-5A may be.

[0202] Eubacteria lack a hypusine-modified eIF-5A equivalent. However, the sequence similarity between eubacterial EF-P and archaebacterial/eukaryotic eIF-5A is significant enough to assume that the two represent homologous proteins (Kyrpides and Woese, 1998). EF-P is essential for viability in Escherichia coli (Aoki et al., 1997) and present in all eubacterial genomes examined. eIF-5A/EF-P can thus be considered a universally conserved and essential protein; it is apparently the only known protein that falls into this category whose function has remained elusive.

[0203] Loss of eIF-5A function is ultimately lethal (Schnier et al., 1991; Kang and Hershey, 1994; Sasaki et al., 1996; Zuk and Jacobson, 1998; Jansson et al., 2000). Saccharomyces cerevisiae cells stop cell division, but continue to enlarge in size. One specific defect is an impaired degradation of mRNA, particularly of short-lived messages (Zuk and Jacobson, 1998). The defect apparently occurs because of reduced mRNA decapping and degradation by the Xrn1p exonuclease and may be consistent with the assumed RNA-binding activity of eIF-5A. However, it is unclear whether RNA turnover is the primary function that makes eIF-5A indispensable for viability in all organisms. Upon eIF-5A inactivation in yeast, the overall rate of translation is reduced by ˜30%, but is not immediately abolished (Kang and Hershey, 1994; Zuk and Jacobson, 1998), suggesting that translational initiation and elongation can proceed in the absence or at very low concentrations of eIF-5A. The intermediate effect on the overall translation rate and the requirement of eIF-5A for viability could possibly be explained by a failure of eIF-5A-deficient cells to synthesize a subset of proteins or to synthesize them in a biologically active form.

[0204] Overexpression of deoxyhypusine synthase is expected to increase the level of hypusine modification found in eIF-5A and thus inhibit senescence and/or promote growth. Likewise overexpression of the eIF-5A exporter exportin 4 is expected to maintain eIF-5A transport levels when the lower affinity unmodified eIF-5A form is present. Overexpression of eIF-5A is expected to increase the levels of unmodified protein and slow growth or the protein may be modified by the endogenous deoxyhypusine synthase to promote growth. Overexpression of L5 can be expected to increase the transcription rate of 5S RNA and may overcome the affects of increasing amounts of unmodified eIF-5A which accumulate during sensecence.

[0205] Nucleic acid and polypeptide sequences for use in generation of transgenic crop plants having improved properties as described in the above strategy are provided in Table 1.

[0206] 14. Endogenous Insecticides

[0207] One method by which plants may defend themselves from herbivorous insects is by producing bioactive secondary metabolites. For example, maize seedlings attacked by beet armyworm larvae (Spodoptera exigua) produce a mixture of terpenoid and indole volatiles that serve to attract parasitic wasps (Turlings and Fritzsche, 1999). This response is induced in plants by the production of volicitin, N-(17-hydroxylinolenoyl)-L-glutamine by the herbivore during feeding (Pare et al., 1998).

[0208] Genes involved in the production of both terpenoids (Shen et al., 2000) and indole (Frey et al., 2000) in response to volicitin have recently been identified in corn. Both terpenoids and indole are induced in response to volicitin, suggesting that overexpression of these genes may lead to increases in terpenoids or indole. Increased production of these compounds may lead to the build up of other insecticidial metabolites such as hydroxamic acids (Gierl and Frey, 1999).

[0209] A gene encoding a 33-kDa cysteine proteinase was recently identified in corn lines resistant to numerous lepidopteran species including fall armyworm (Spodoptera frugiperda), southwestern corn borer (Diatraea grandiosella), European corn borer (Ostinia nubilalis), sugarcane borer (D. saccharalis), tobacco budworm (Heliothis virescens) and corn earworm (Helicoverpa zea) (Pechan et al., 1999; Pechan et al., 2000). Larvae reared on Black Mexican Sweet (BMS) callus that was transformed to express active 33-kDa cysteine proteinase were markedly smaller than those reared on control callus. Low concentrations of the 33-kDa cysteine proteinase were constitutively present in the whorl and the protein accumulated greatly in response to larval feeding, suggesting that this protein may also be part of the response to volicitin. Overexpression of this protein may reduce feeding damage due to lepidopteran insects.

[0210] Sesquiterpene cyclase mutants lack the sesquiterpenoid naphthalene, 1,2,4α-5,8,8α-hexahydro-4,7-dimethyl-1-(1-methylethyl)-(1,4α,8α), which is a volatile component of the set of terpenoids produced by maize in response to volicitin (Shen et al., 2000). In contrast, biochemical analysis has defined hydroxymethyl glutaryl (HMG)-CoA reductase and terpenoid synthase as two key regulatory enzymes of terpenoid biosynthesis (Bohlmann et al., 1998). HMG-CoA reductase catalyzes the committed reaction of the general terpenoid synthesis pathway. Terpenoid synthase catalyzes the divergent reactions that produce the vast variety of terpenoids seen in plants.

[0211] Overexpression of either terpenoid synthase or HMG-CoA reductase may lead to the overexpression of volatile leading to increased pest resistance in a transgenic plant (Turlings et al., 1990, Shen et al., 2000).

[0212] IGL (indole-3-glycerol phosphate lyase) is similar to the maize bx1 gene and a newly identified corn gene called TSA-like that is believed to be the corn tryptophan synthase alpha subunit. Overexpression of either bx1 or IGL should increase levels of indole and possibly also levels of DIMBOA. Accumulation of hydroxamic acids such as DIMBOA should lead to detectable changes in insect growth rates.

[0213] The mir1 33-kD cysteine proteinase protein belongs to the papain family of cysteine proteases. The protein is very similar to three other maize cysteine proteases, mir2, mir3 and CPPIC and the rice protease oryzain alpha with the exception of it's C-terminus which lacks a conserved region found in the other four proteases. CPPIC is found as a complex with cystatin (Yamada et al., 1999). All of these proteins are predicted to be secreted due to N-terminal signal sequences. The C-terminal truncation of mir1 may act to activate the protein by reducing interaction with cystatin or to increase the free concentration of cystatin, which then leads to the reduction in insect feeding and growth rates. It is expected that overexpression of cystatin in maize will also lead to a reduction in insect feeding.

[0214] Nucleic acid and polypeptide sequences for use in generation of transgenic crop plants having improved properties as described in the above strategy are provided in Table 1.

[0215] 15. Freezing Tolerance—Eskimo 2

[0216] eskimo2 (esk2) is a mutant in Arabidopsis thaliana ecotype which accumulates high levels of free proline and is constitutively freeze-tolerant in the absence of cold acclimation. Esk2 was cloned based on map position and corresponds to the gene F28A21.190 (g4539397) annotated by the public Arabidopsis sequencing project. ESK2 is annotated as a cellulose synthase-like protein because it has a strong similarity to a presumed cellulose synthase (U58283) gene isolated from a cotton fiber library. Currently, two cellulose synthase genes have been cloned from Arabidopsis, RSW1 (AF027172) and IRX3 (AF088917 and AF091713). Esk2 is a new gene that shows 60% identity with either of the two cellulose synthase genes previously isolated from Arabidopsis. The constitutive freezing tolerance phenotype shown by esk2-2 mutants suggests that esk2 may mediate freezing tolerance in Arabidopsis. The N-terminal 200 amino acid sequence is strongly similar to the PHD domain of a class of transcription factors.

[0217] Rajashekar and Burke (1996) and Rajashekar and Lafta (1996) reported that cold acclimation and abscisic acid treatment induces changes in cell wall properties. These changes are correlated with increases in freezing tolerance. Marshall and Dumbroff (1999) showed that cell wall adjustment in response to slow drought and pacloputrazol treatment is associated with turgor regulation and drought tolerance in white spruce. Consistent with a possible role in structural polymer biosynthesis, xylem structure in both esk2-1 and esk2-2 plants appears to be affected by the esk2 mutation. In contrast to the published irx3 mutant, which has less rigid stems than those of wild-type, stems of esk2-1 appear to be stronger. By sequence analysis, there are about 16 genes encoding cellulose synthase-like proteins in Arabidopsis. It is unclear if all cellulose synthases or specific ones that involve the modification of cell wall properties related to abiotic stress tolerance. Expression of the gene esk2 in corn is expected to contribute to increasing cold tolerance and water use efficiency in a plant.

[0218] Nucleic acid and polypeptide sequences for use in generation of transgenic crop plants having improved properties as described in the above strategy are provided in Table 1.

[0219] 16. Fatty Acid Desaturases

[0220] One promising approach to improving cold or heat tolerance in plants is to alter the composition of membrane lipid fatty acids (Somerville, 1995). It is expected that increasing the desaturation of fatty acids will allow membranes to remain fluid and functional at lower temperatures. This idea is supported by several lines of evidence. First, comparison of the membrane lipid fatty acid composition of chill-sensitive and. chill-tolerant species indicated that chill-tolerant species tend to have greater amounts of desaturation in the chloroplast membrane lipid, phosphatidylglycerol. Also, when chill-tolerant plants are acclimated to cold temperatures, the amount of desaturated fatty acids increases. Second, mutants of Arabidopsis and Synechocystis defective in various desaturases are more chill-sensitivite than wild type. Finally, introduction of transgenes that increase membrane lipid desaturation has resulted in plants that have increased cold tolerance, while transgenes that decrease membrane lipid desaturation resulted in plants that are more chill sensitive. It has recently been shown that decreasing trienoic fatty acids in chloroplast membrane lipids in transgenic tobacco and Arabidopsis resulted in greater heat tolerance (Murakami et al. 2000).

[0221] In rice, there is a strong correlation among different varieties between high levels of 18:3 fatty acids and cold tolerance (Bertin et al. 1998). Biosynthesis of 18:3 fatty acids is catalyzed by omega 3 desaturases. Arabidopsis has three genes that encode omega 3 desaturases. FAD3 encodes a microsomal form, and FAD7 and FAD8 encode proteins targeted to the chloroplast. FAD8 mRNA accumulation is induced by low temperature. Expression of an omega 3 desaturase from Arabidopsis, FAD7, in tobacco caused increased accumulation of 18:3 fatty acids and increased cold tolerance (Kodama et al. 1995).

[0222] It is believed that the overexpression of either Arabidopsis FAD7 or FAD8 genes in corn will contribute to cold tolerance. It is also believed that down regulation of FAD7 by antisense or cosupression may contribute to heat tolerance. Use of fatty acid desaturase transgenes to confer chilling tolerance is disclosed in PCT Publication No. WO 94/18337.

[0223] Fatty acid composition of leaf tissue is determined in transgenic plants expressing FAD7 or FAD8. High and low temperature tolerances are tested if the desired modifications in fatty acid composition are obtained. Cold tolerance is tested by germination and rate of seedling growth at an inhibitory temperature. Chlorophyll and anthocyanin accumulation at a chilling temperature are also determined. Heat tolerance is determined by seedling growth at high temperature, and by chlorophyll accumulation at high temperature. Effects of high temperature on fertility are either determined by growth in a hot greenhouse or at an appropriate field site.

[0224] Nucleic acid and polypeptide sequences for use in generation of transgenic crop plants having improved properties as described in the above strategy are provided in Table 1.

[0225] 17. Ferritin

[0226] During an abiotic or biotic stress response, plants undergo a structural change within the cell wall to maintain their defenses against other stresses or pathogen attacks. Membrane-mediated responses occur, which include release and accumulation of reactive oxygen species and lipoxygenase enzymes. Hyperoxidation of membrane phospholipidsis is triggered, resulting in production of toxic compounds that disrupt cell membranes and may cause cell collapse and death. The maintenance of cell wall integrity during stress is a key to maintaining plant productivity. As a result of abiotic stress, oxidative stress at the cellular level causes much damage (Buchanan et al., 2000). It is believed that antioxidant enzymes are critical for prevention of oxidative stress in plants (Allen, 1995).

[0227] Overexpression of ferritin in plants results in an increase of resistance to abiotic and biotic oxidative stresses. Ferritins are multimeric proteins containing 24 subunits and have been found to maintain cell wall composition. The ferritin gene family occurs in plants, animals and microorganisms and is responsible for storage and distribution of iron within cells. Ferritin synthesis in plants is regulated at the transcriptional level as opposed to translational control as in animals. Plant ferritins are localized in plastids whereas in animals, they are found in the cytoplasm (Gaymard et al. 1996).

[0228] Ferritin gene expression has been demonstrated in a variety of plants including maize, Arabidopsis, cowpea, soybean, bean and pea. Most available evidence shows that the mature protein is located in plastids and its production is under transcriptional control. Briat et al. (1999) suggested that an A. thaliana library of expressed sequence tags might contain sequences derived from divergent ferritin sequences. This information implies that there is a large family of ferritin genes in each higher plant genome (Wardrop et al., 1999). Briat et al. (1999) further reported on a family of homologous ferritin sequences in maize. These disclosed sequences varied mostly in the control regions of the genes.

[0229] Different ferritin subunits are expressed under different physiological conditions (Fobis-Loisy et al., 1995; Savino et al. 1997). In maize, two different nuclear ferritin genes have been identified; they were found to express protein under different physiological conditions and are named ZmFer1 and ZmFer2. The two different ferritin genes that have been identified are differentially expressed in response to abscisic acid or iron-mediated oxidative stress (Savino et al, 1997). A cellular pathway involving abscisic acid (ABA) regulates ZmFer2, but the ZmFer1 gene is regulated via an ABA-independent pathway (Petit et al., 2000). ZmFer2 mRNA accumulates in response to both iron and ABA treatments, whereas ZmFer1 mRNA level is only increased by iron treatment (Briat et al, 1999). Petit et al. (2001) demonstrated in plantlets from which the roots were removed and maize cell suspension that the ZmFer1 gene is regulated by both iron and redox signals. Hydrogen peroxide treatments induce an increase in ZmFer1 mRNA levels and treatment with N-acetylcysteine (NAC), an antioxidant agent, inhibited iron-induced accumulation of the ZmFer1 transcript. This implies that ZmFer1 accumulates in response to iron via an oxidative step in the pathway as disclosed by Savino et al. (1997). A similar result was observed in Arabidopsis, where an increase of AtFer1 transcript in response to iron was inhibited by the antioxidant N-acetylcysteine (NAC). These results indicate that an oxidative pathway, independent of abscisic acid, could be responsible for the iron induction of ferritin synthesis in A. thaliana.

[0230] The production of reactive oxygen species (ROS) occurs during oxidative stress due to the release of free iron ions from ferritin degradation. Oxidative stress is caused by drought, heat, cold stress and pathogen attack. Overproduction of ferritin causes more iron to be bound and therefore eliminates damage that may be caused by oxygen free radicals (WO 98/46775). Overexpression of ferritin in plants, specifically alfalfa ferritin expressed into tobacco, was reported to make transgenic plants more resistant to oxidative stress. Transgenic plants sprayed with paraquat and fusaric acid, which cause oxidative stress, had reduced necrotization relative to nontransgenic plants.

[0231] Overexpression of ferritin promotes cellular productivity during limited water conditions to prevent formation of oxygen radicals. Iron is also important in plant-specific pathways like nitrogen fixation and phytohormone synthesis. Iron starvation results in physiological changes in plants (Allen, 1995). Ferritin is localized to the plastids in plants and is degraded during germination for iron utilization for growth of the seedling. Iron deficiency leads to chlorosis of leaf tissue, which is an indicator that sufficient chlorophyll is not present, and that photosynthesic activity has been reduced. Iron toxicity is linked to high reactivity to oxygen species and production of hydroxyl radicals, both of which can damage cell components (Savino et al., 1997). This can result in activation of ferritins by iron. Ferritin mRNA accumulation was inhibited in the presence of an antioxidant in maize plantlets that were de-rooted and it also accumulates in response to iron overload. A five-fold increase in ABA concentration in roots and leaves was observed in response to an iron overload in maize plantlets and ferritin mRNA accumulated in response to exogenous ABA treatment (Briat et. al, 1999).

[0232] Nucleic acid and polypeptide sequences for use in generation of transgenic crop plants having improved properties as described in the above strategy are provided in Table 1.

[0233] 18. Farnesylpyrophosphate Synthase

[0234] FPPS, farnesylpyrophosphate synthase, plays a role in glyphosate resistance in yeast.

[0235] Expression of FPPS in corn may be useful to develop improved glyphosate formulations, increase glyphosate resistance, screen for compounds that synergize with glyphosate, broad spectrum disease control, or broad spectrum insect control.

[0236] Nucleic acid and polypeptide sequences for use in generation of transgenic crop plants having improved properties as described in the above strategy are provided in Table 1.

[0237] 19. Fungal Resistance

[0238] Cold field temperatures after planting corn seed in the soil can delay germination and emergence of the seedling from the soil. If emergence of the corn seedling from the soil is significantly delayed, fungal infection of the seed may occur, thus severely damaging or destroying it. One approach to introduce cold tolerance into corn seedlings is to make the seed or seedling more resistant to fungal infection. Such a seed/seedling may be better adapted to survive without fungal infection until soil temperature increases.

[0239] Mendel Biotechnology has identified genes (G28, G378, G19 and G188) that confer enhanced fungal resistance in Arabidopsis plants when overexpressed with a constitutive promoter. The gene sequence for G28 corresponds to AtERF1 (Fujimoto, et al. 2000), which is described as an Ethylene Responsive Element Binding Factor (EREBP). In general, these genes are thought to be involved in various stress responses. A homolog of G28 from wheat is provided herein.

[0240] It is expected that constituitive overexpression in corn of the G28 and G378 genes and their homologs will enhance fungal resistance, and may indirectly enhance cold tolerance of corn plants by allowing the plants to resist fungal infection when emergence from the soil is delayed by cold temperatures.

[0241] Nucleic acid and polypeptide sequences for use in generation of transgenic crop plants having improved properties as described in the above strategy are provided in Table 1.

[0242] 20. Gamma-Aminobutyric Acid Synthesis

[0243] Gamma-aminobutyric acid (GABA) is a non-protein amino acid produced ubiquitously in plants. GABA is synthesized primarily through the alpha decarboxylation of L-glutamate catalyzed by the enzyme glutamate decarboxylase (GAD). GABA is well known in animals as a stress-induced inhibitory neurotransmitter but its exact role in plant metabolism is unclear. Much research has shown that high levels of GABA accumulate rapidly in plant tissues that are exposed to a wide variety of stresses. Examples of the greatest reported GABA accumulation are: acidosis, 300% of control in 15 seconds (Crawford, 1994); mechanical damage, 1800% of control in 1 min. (Ramputh, 1996); cold, 2000% of control in 5 minutes. (Wallace, 1984); anoxia, 1000% of control in 24 hours. (Aurisano, 1995); heat, 1800% of control in 24 hours (Mayer, 1990); drought, 1000% of control in 3 days (Thompson, 1996); salt, 300% of control in 5 days (Bolarin, 1995); and viral, 130% of control in 13 days (Cooper, 1974). Many of these stresses are unrelated which implies a linkage between the perception of the stress, GABA accumulation and diverse mitigation of each stress. This implies a signal transduction pathway and a role for GABA as a signaling molecule. Studies have shown that signaling molecules must follow certain criteria. They alter gene expression (activate enzymes), alter growth (metabolism), and have receptor molecules (Kinnersly, 2000).

[0244] Several plant GAD genes have been cloned (Baum, 1993; Johnson, 1997; Turano, 1998; Yunand Oh, 1998; Zik, 1998). Recent studies have found that plant GADs have 22 to 25 additional amino acids at the C-terminal when compared with mammalian GADs and these domains have been shown to be sufficient for the binding of calmodulin (CaM) and Ca2+(Arazi, 1995; Gallepo, 1995; Ling, 1994; Snneden, 1996). Another study found that CaM binding is required for GABA metabolism and normal plant development in plants (Baum, 1996). It is well recognized that Ca2+/CaM complexes stimulate enzymes to initiate a cascade of biochemical and molecular events in plant cells (Zielinski, 1998) and that many environmental stresses increase Ca2+levels in cells (Sanders, 1999). Cloned cDNAs encoding GAD have been used to demonstrate that Ca2+/CaM play a role in regulating GAD activity that was stimulated nearly 100 fold (Snedden, 1996). Another study investigated the role of Ca2+/CaM in cold-shock stimulated GABA synthesis of rice (Oryza sativa) isolated mesophyll cells. In the same study, a fluorescent indicator demonstrated an increase in Ca2+ levels within 2 sec. of the cold shock with GABA increases within a minute. A Ca2+ ionophore stimulated similar Ca2+ levels and GABA synthesis in the absence of the cold while Ca2+ channel blockers and CaM antagonists inhibited cold shock stimulated GABA accumulation (Cholewa, 1997).

[0245] It has been suggested that GABA is an inducer of “stress ethylene”. Direct evidence of GABA's effect on ethylene production was obtained in vitro with Stellaria longipes, when ethylene evolved and stem elongation was promoted by high concentrations of GABA (Kathiresan, 1998). In a separate study with sunflower cotyledons, there was a 14-fold increase in ethylene production with exogenously applied GABA (Kathiresan, 1997).

[0246] GABA has been found to alter growth by mineral acquisition in experiments with duckweed (Lemma minor L.). Plant growth and mineral content were increased when duckweed plants were cultured in media containing 1 and 10 mM GABA. Plants treated with 10 mM GABA had significantly higher levels of all macronutrients and manganese, zinc and boron than in untreated plants (Kinnersley, 2000). In another study, wheat plants treated with foliar applied GABA yielded 35% more grain with plant tissue containing 32% higher manganese levels than untreated plants (Kinnersley, 1998). Manganese is an essential element for activating enzymes in the lignin biosynthetic pathway (lignin is a complex polymer in cell walls that acts as a physical barrier to fungal hyphae, wounding, etc). In tomatoes, exogenous GABA treatments increased in plant nutrients and yield as compared to untreated plants (Kinnersley, 1998). These observations suggest that GABA mediates a root-specific response and intercellular GABA transport by stress-induced GABA transporter proteins has been discussed (Shelp, 1999).

[0247] GABA has been identified as playing a role in stress metabolism. GABA is synthesized as described above by GAD enzymes catalyzing the reaction L-Glu+H+→GABA+CO2. GABA is metabolized through a reversible transamination (GABA+pyruvate=succinic semialdehyde+Ala) catalyzed by GABA transaminase. The product succinic semialdehyde is oxidized to succinate (succinic semialdehyde+NAD+H2O→succinate+NADPH) in an irreversible reaction catalyzed by succinate dehydrogenase.

[0248] GABA metabolism takes place in the mitochondria and the above three reactions constitute a pathway known as the GABA shunt. It is important to plant metabolism that intramitochondrial concentrations of the citric acid cycle (TCA cycle) intermediates remain constant over time. Anaplerotic reactions (filling up reactions) are metabolic processes that ensure this constancy. Since the TCA cycle performs an anabolic role, intermediates are drained from the cycle for biosynthesis of amino acids. A crucial role of anabolic reactions is in stress related metabolism. Amino acids form the buidling blocks for heat shock proteins, cold-induced proteins, anaerobic proteins, pathogen-related proteins, etc. Depletion of TCA cycle intermediates during times of stress has been demonstrated to be relieved by anaplerotic carbon fixation of oxaloacetic acid that is synthesized from phosphoenolpyruvic acid (PEP) by PEP carboxylase (Plaxton, 1996). When PEP carboxylase is limited, because PEP is required to support stress-induced phenylpropanoid biosynthesis and its byproduct lignin, the GABA shunt may provide carbon through GABA catabolism to succinic acid (Shelp, 1999).

[0249] The final criteria for GABA being a signaling molecule came with the discovery of glutamate receptor-like genes in plants. Glutamate receptor genes (GLR) have domains in common with the GABA receptors in animals. Mammalian GABA receptors function by modulating CA2+ ion channels in response to stress. Animal mitochondria have an important role in cellular Ca2+ signaling by releasing large quanties of Ca2+ (Babcock, 1997). Plant mitochondria are a likely store of Ca2+ and a possible site of GABA receptors (GLR's). Studies have shown that stress induced release of Ca2+ from maize mitochondria (Subbaiah, 1998). Plant enzymes that catabolize GABA are found in the mitochondria exclusively (Breitkreuz, 1995). The GABA-like receptor gene from Arabidopsis thaliana, GLR2, is reported to regulate the utilization of Ca2+. Plant GLR's contain six signature domains characteristic of animal ionotropic glutamate receptors (iGLRs). These include three transmembrane, one pore forming and two putative glutamate binding domains located in the C-terminal. Arabidopsis GLR's have a high degree of sequence homology to the iGLR's (Lam, 1998). Hydrophobicity analysis and transmembrane analysis models confirm this similarity (Lam, 1998; Chiu et al., 1999).

[0250] Overexpressed levels of GAD1 and GAD2 genes in Zea mays L. may result in plants that have higher concentrations of GABA and therefore are more tolerant to diverse stress and are higher yielding. Overexpressed levels of GLR2a, GLR2b, GLR5, GLR6 and GLR7 genes in Z. mays may result in a higher concentration of GABA receptors for signaling stress tolerance.

[0251] Overexpression of yeast glutamate decarboxylase in yeast has been demonstrated to increase tolerance to both hydrogen peroxide and diamide (Coleman et al., 2001). Expression of this gene in maize both in a native form and with mitochondrial signal peptide is expected to increase stress tolerance.

[0252] Nucleic acid and polypeptide sequences for use in generation of transgenic crop plants having improved properties as described in the above strategy are provided in Table 1.

[0253] 21. Heat Generation

[0254] The inability of maize plants (Zea mays L.) to endure low temperatures and freezing is a major determinant of where the crop is grown. Even in climates considered suitable, crop failure or decreases in yield frequently occur due to cold temperatures. Injury to the plant's cell membrane is the primary site of cold damage (Troyer et al., 1999).

[0255] Ice formation is initiated in the intercellular spaces of the plant's cells, because the extracellular fluid has a higher freezing point or lower solute concentration than intracellular fluid. Liquid water moves down the chemical potential gradient from inside the cell to the intercellular spaces. The plasma membrane is damaged due to dehydration causing lysis, segregation of proteins within the membrane (phase transition) and fracture lesions. The cell's cold-induced production of reactive oxygen species contributes to the membrane damage (Makensie and Bowley, 1997). At prolonged exposure to below freezing temperatures, intercellular ice can cause cell rupture (Olien and Smith, 1977).

[0256] The natural ability of some plants to generate heat was first reported over 200 years ago by the French naturalist Jean-Baptist de Lamarck upon observing that the European arum lily became warm when flowering. More recent observations conducted on the skunk cabbage (Symplocarpus foetidus) reported that it is able to hold its temperature between 15 and 22 degrees C. when air temperatures are below freezing. It is postulated that the plant converts electrochemical energy from the production of ATP to the production of heat (Seymour, 1997).

[0257] Plant mitochondria produce cellular ATP from ADP as electron transfer in the respiratory chain induces the transport of protons across the mitochondrial membrane providing the driving force for oxidative phosphorylation. This electron transport chain is located in the mitochondria's inner membrane and contains four respiratory electron carrier complexes. Electrons are generated from the oxidation of NADH and succinic acid. Each of the four complexes are capable of rapid and reversible oxidation and reduction components and thus acts as an electron carrier. The terminal complex passes electrons to molecular oxygen and this final electron acceptor is reduced to water. The transfer of electrons to molecular oxygen yielding water is catalyzed by oxidases. Plant mitochondria contain two terminal oxidases: cytochrome oxidase located in complex IV and an alternative pathway which branches from the cytochrome pathway at the ubiquinone pool (electron carrier—dissolved quinol in the mitochondria's inner membrane lipid bilayer). This pathway passes electrons to alternative oxidase and reduces molecular oxygen to water in a four electron step. ATP production is not a byproduct of this pathway (Day et al., 1991; Day et al., 1995; Day and Wiskich, 1995, Maia et al., 1998, Rhoads and McIntosh, 1991).

[0258] The pathway was first discovered in the arum lily family (Araceae) where heat produced during anthesis attracts pollinators to aromatic compounds in the inflorescence. For a few hours during the two to four day period during the onset of flowering the rate of respiration increases from 20 μL to 100 μL of oxygen consumed per 100 mg fresh weight per hour to 1,000 μL to 1,500 μL of oxygen consumed per 100 mg of fresh tissue per hour (Chivasa et al., 1999; Li el al., 1996; Low and Merida, 1996).

[0259] Alternative oxidase was first cloned from the voodoo lily (Sauromatum guttatum). Antibodies were used to isolate a nuclear encoded 42-kDa polypeptide cDNA clone designated AOX1. AOX1 clones have since been isolated from numerous other species (Cruz-Hernandez and Gomez-Lin, 1995; Elthone et al, 1989; Kumar and Soil, 1992; Laloi et al., 1997, Nagano et al., 1995, Scandalios, 1990; Simons et al., 1999).

[0260] AOX1 is upregulated by stress including oxidative stress, cold, drought and wounding. AOX1 gene expression responds to harmful active oxygen species such as superoxide, peroxide, or a hydroxyl radical that are generated during periods of biotic and abiotic stress (Allen, 1995; Low and Merida, 1996; Scandalios, 1990; Wagner, 1995; Wagner and Moore, 1997; Yukiok et al., 1998). Alternative oxidase is cyanide resistant with a non-heme binuclear iron center (cyanide is produced during wounding and shuts down the cytochrome (heme) pathway (Albury et al., 1996; Siedowet et al., 1995)). The level of alternative oxidase present in the mitochondria determines the maximum possible partitioning of electrons to the alternative pathway (Hiser et al., 1996; Sedow and Ulmbach, 1995; Siedow et al., 1995; Vanlerberghe and McIntosh, 1999). Alternative oxidase is controlled to its most active or reduced state by the levels of reduced ubiquinone and by the oxidation of TCA cycle substrates isocitrate and malate (Vanlerberghe et al, 1995; Vanlergerghe and McIntosh, 1999).

[0261] Transgenic tobacco and potato with overexpressing AOX1 showed increased alternative oxidase activity in the mitochondria when the cytochrome pathway was inhibited by cyanide (Hiser et al., 1996; Vanlerberghe et al., 1994). Overexpressed levels of AOX1 in transgenic tobacco lowered the reactive oxygen species that are harmful to cells. Antisense suppression of AOX1 resulted in significantly higher levels of ROS than in wild type, whereas overexpression lowered the levels of reactive oxygen species (Maxwell et al., 1990). It is expected that overexpression of alternative oxidase in Z. mays will lead to increased tolerance of the plant to oxidative, drought and cold stresses.

[0262] In mammals, mitochondrial uncoupling proteins (UCP) dissipate the proton gradient formed through respiration without ATP synthesis. Mammals are able to maintain their body temperatures in cold environments as energy is readily converted to heat (Seymour, 1997). Nuclear encoded mitochondrial uncoupling proteins contain six transmembrane domains and are mainly expressed in the inner mitochondrial membrane of brown adipose tissue in mammals. A cDNA encoded peptide, identified using a yeast two hybrid protein-interaction trap was used to isolate a full-length cDNA from a potato (S. tuberosum) cDNA library that is 44% homologus to the mammalian UCP1 protein at the amino acid sequence level. The StUCP has a molecular mass of 32K and consists of three 100-residue domains. Each domain contains two transmembrane regions and a mitochondrial transporter motif. The protein was found to be expressed in leaves and tubers at low levels, at moderate levels in stems and fruit and at high levels in roots and flowers (Laloi et al., 1997). A similar protein was cloned from Arabidopsis thaliana termed AtPUMP (H) and a novel isoform cDNA cloned in A. thaliana (AtUCP2; Watanabe et al., 1999).

[0263] It was hypothesized that fatty acid mediated anion transport across the inner mitochondrial membrane was responsible for proton uncoupling. According to this hypothesis, the uncoupling protein is a pure anion porter and does not transport protons. It is designed to enable fatty acids to behave as cycling protonophores and anions are transported through the fatty acid domain of UCP (Garlid et al, 1996). A second report concluded that the UCP1 was able to transport protons in the absence of fatty acids (Gonzalez-Barroso et al., 1998). In another study, linoleic acid induced the activity of tomato fruit (L. esculentum). Tomato is a climacteric fruit known to express both PUMP and AOX proteins (Jezek et al., 1996; Jezek et al., 1997). An increase in respiration was observed from 151 to 411 nmol of oxygen atom/min/mg of mitochondrial protein. This increase in respiration was linked to PUMP activation. Exponential flux-voltage characteristics were studied and it was concluded that PUMP can efficiently divert energy from oxidative phosphorylation (Jarmuszkiewicz et al., 1998).

[0264] Expression of the S. tuberosum UCP protein was strongly induced by cold treatment after 1 to 2 days exposure to 4 degrees C. and is postulated to be important in plant thermogenesis (Laloi et al., 1997; Vercesi et al., 1995). It is expected that overexpression of a PUMP or UCP-like protein in Z. mays will increase plant tolerance to cold stress.

[0265] Higher plant mitochondria have been reported to contain an alternative terminal oxidase in the electron transport chain that is recognized to be a part of the plant's ability to regulate its energy/carbon balance in response to a stressful environment (McIntosh, 1994; Vanlerberghe et al., 1995). Alternative oxidase genes that have been sequenced encode a highly similar protein with two alpha-helical membrane-spanning regions in the center and a possible alpha-helix that is surface exposed. There are N- and C-terminal hydrophilic regions that are exposed to the mitochondrial matrix (Rhoads and McIntosh, 1991; Siedow et al., 1992). It is postulated that the conserved cysteine residues in the N-terminal region form a labile disulfide-bridge. The oxidation (less active form) or reduction (most active form) of this bridge controls alternative oxidase activity. Sequence data suggests that that the protein contains four potential small C-terminal alpha-helices and two contain a totally conserved Glu-X-X-His motif with a binuclear iron center (Albury et al., 1998; Saisho et al., 1997; Siedow et al., 1995). Using PCR analysis, three isoforms of the alternative oxidase gene have been identified in soybean and two or more copies of the gene have been identified in tobacco (McCabe et al., 1998; Whelan et al., 1996). The isoforms are differentially expressed during plant development; i.e., AOX1 is expressed cotyledons and leaves, AOX3 is expressed in the leaves and AOX2 is expressed in the aging plant. The structure of the S. guttatum AOX1 gene (Finnegan et al., 1997 and Rhoads and McIntosh, 1993) and its promoter (McKersie and Bowley, 1997) have been described. Salicylic acid-responsive elements are located in the region-525 to -568. Salicylic acid triggers increased expression of alternative oxidase (Raskin et al., 1989; Rhoads and McIntosh, 1992) and is a by-product of plant's response to stress. The expression of the AOX1 gene also responds to reactive oxygen species (ROS) as signals are sent to the nucleus to activate AOX1 (Allen, 1995; Low and Merida, 1996; McIntosh, 1994; Scandalios, 1990; Simons et al., 1999; Wagner, 1995; Wagner and Moore, 1997). Hydrogen peroxide is reported to be an intermediate in this signalling process (McIntosh et al., 1993).

[0266] The actual electron flux to the alternative pathway is controlled via it's redox state (reduced, most active). The ubiquinone pool is dependent upon the activity an NADH-dehydrogenase and succinate-dehydrogenase supplying electrons for ubiquinone reduction and the terminal oxidases' activity. Q electrode experiments have determined that the level of reduced ubiquinone determines alternative oxidase activity (Ojajanegara et al., 1999; Moore and Siedow, 1991; Ribas-Carbo et al, 1995; Siedow and Bickett, 1981). Therefore, the high levels of TCA cycle electron carrier byproducts determine the active alternative pathway, as the cytochrome pathway shuts down with high levels of reduced ubiquinone. In this manner, the alternative oxidase contributes to a higher level of carbon skeletons supplied for the plant's use during times of stress by favoring electron transport and oxidation of the pyridine nucleotide pool of the TCA cycle (Crawford et al., 1989; Issakidis et al., 1994; Scheibe, 1991). Transgenic tobacco containing incresed levels of alternative oxidase protein were used to determine the mechanisms regulating AOX1 activity. Reduction of AOX1 to its most active or reduced form was generated by the oxidaton of TCA cycle substrates isocitrate and malate (isocitrate dehydrogenase and malate dehydrogenase) (Umbach and Siedow, 1993).

[0267] Transgenic tobacco plants containing sense and antisense DNA constructs were used to produce plants with increased and decreased levels of AOX1. Suspension cells, grown in heterotrophic batch culture confirmed that genetic alteration of the level of AOX1 was sufficient to alter the level of electron transport through the alternative pathway (Vanlerberghe and McIntosh, 1999). The alternative pathway may function as a mechanism to decrease the formation of reactive oxygen species (ROS) produced during respiratory electron transport while the plant is experiencing abiotic or biotic stress. The ROS-sensitive probe 2′,7′-dichlorofluorescein diacetate proved that the overexpression of AOX1 resulted in cells with lower reactive oxygen species as compared to wild-type (Maxwell et al., 1999).

[0268] It is expected that expression of alternative oxidase-type proteins as well as UCP-like proteins in transgenic plants will increase the tolerance of the plants to chilling and freezing conditions, as well as increase resistance and oxidative stress.

[0269] Nucleic acid and polypeptide sequences for use in generation of transgenic crop plants having improved properties as described in the above strategy are provided in Table 1.

[0270] 22. Heat Tolerance

[0271] Heat stress can reduce corn yields. Shaw (1983) reported that each 1° C. increase in temperature over 25° C. results in a 3 to 4% decrease in grain yield. The deleterious effects of heat on yield may be due to a reduction in the rate and duration of endosperm cell division in the early phases of endosperm development (Jones et al., 1985), a reduction in kernel growth rates during the fill period or a reduction in the fill period (Wilhelm et al., 1999). Long term analysis of weather patterns and corn yield has suggested that reductions in corn yield due to heat stress are most severe when high temperatures occur in conjunction with low levels of rainfall (Carlson, 1990). Coupled with predicted climate changes and increases in the frequency of climatic extremes (Easterling et al., 2000), heat tolerance can be expected to increase in importance as a factor in determining corn yield.

[0272] Overexpression of proteins shown to improve heat tolerance in other plants may increase heat tolerance in corn and lead to an improvement in corn yield. These effects may only be manifest in years where temperatures are high and may best be used in conjunction with other yield enhancing genes such as those that confer tolerance to low soil moisture levels.

[0273] Screening for improved germination rate at 32° C. in A. thaliana plants overexpressing endogenous transcription factors has identified two genes encoding transcription factors, G682 and G464, which increase heat tolerance of transgenic plants relative to wild type controls. G682 (GenBank Accession No. CAB80915) encodes a 77 amino acid protein with a single C-terminal myb domain. G464 is derived from Indole Acetic Acid Induced 2 (IAAI2) (GenBank Accession No. Q38830), but G464 encodes a C-terminal truncation of IAAI2 due to a 4 nucleotide deletion in the sequence. Neither of these genes appears to have a monocot orthologue. However, sequences were identified for two corn IAA/AUX family members.

[0274] Overexpression of HSF1 and HSF3, transcription factors that regulate expression of heat shock genes in A. thaliana, has also been shown to improve thermotolerance in A. thaliana (Lee et al., 1995; Prandl et al., 1998). In both cases, overexpression of the heat shock factors is associated with constitutive expression of heat shock proteins. Tomato HSF A1 and A2 can functionally replace yeast HSF1 (Boscheinen et al., 1997), suggesting that the yeast protein may be able to function in plants.

[0275] Heat shock proteins act to ameliorate problems caused by protein misfolding and aggregation at higher temperatures (Saibil, 2000). Modification of HSP levels has been reported to alter thermotolerance in several different plant systems. Overexpression of HSP101 has been report to improve thermotolerance in A. thaliana (Queitsch et al., 2000). Likewise overexpression of HSP17.7 has been reported to improve thermotolerance in carrot cells (Malik et al., 1999). Antisense inhibition of HSP70 has also been reported to decrease thermotolerance in A. thaliana (Lee and Schoffl, 1995). In these latter two cases, expression of other heat shock genes was modified by altering the expression of the target gene suggesting a complex relationship between heat shock protein levels and their synthesis.

[0276] HSP 101 or clpB proteins are highly conserved and have been suggested to rescue aggregated proteins (Glover and Lundquist, 1998). HSP101 has been cloned from maize (Nieto-Sotelo et al., 1999) and shown to complement a yeast HSP104 deletion (Nieto-Sotelo et al, 2000). Corn HSP101 appears to be somewhat more closely related to bacterial clpB than HSP104. This suggests that overexpression of microbial HSP101 orthologues may also improve corn thermotolerance.

[0277] Nucleic acid and polypeptide sequences for use in generation of transgenic crop plants having improved properties as described in the above strategy are provided in Table 1.

[0278] 23. Heterotrimeric G Proteins

[0279] Heterotrimeric G-proteins have been suggested to play a role in a number of different plant environmental and developmental responses including gibberillic acid (GA) signaling, stomatal movement and disease resistance responses. Altering the activity of these proteins may improve corn productivity by increasing tolerance to high density planting, altering plant height, altering water relations parameters or increasing resistance to pathogens.

[0280] The isolation of a rice dwarf mutation which is less responsive to GA and contains a mutation in the alpha subunit of a heterotrimeric G protein suggests that these proteins are involved in GA signaling (Fujisawa et al., 1999; Ashikari et al., 1999; Ueguchi-Tanaka et al., 2000). This conclusion is consistent with studies of GA induced alpha-amylase expression in barley aleurone (Jones et al., 1998).

[0281] Studies have suggested that heterotrimeric G-proteins can activate inward rectifying K+ channels that are involved in guard cell movement (Li and Assmann, 1993; Wu and Assmann, 1994). The effects of G protein on guard cell movement may be indirect, as they have been shown to bind to and modulate the polymeric state of tubulin (Wang et al., 1990; Roychowdhury and Rasenick, 1994; Ravindra et al., 1996). Alterations in the cellular tubulin pool have been shown to be required for stomatal closure (Huang et al., 2000; Marcus et al., 2001).

[0282] Several different subunits from heterotrimeric G proteins have been cloned from plants, including two distinct types of G-alpha subunit (Ma et al., 1990; Lee and Assman, 1999). Plant G-alpha (Weiss et al., 1993), G-beta (Peskan and Oelmulle, 2000) and G-gamma (Mason and Botella, 2000) subunits have been reported to be ubiquitously expressed with the highest levels found in younger tissues. Tobacco alpha and beta subunits have also been reported to be induced by auxin (Kaydamov et al., 2000).

[0283] Two potential G protein coupled receptors have been identified in plants. GCR1 is most closely related to D. discoideum cAMP receptors. Anti-sense suppression of GCR1 leads to decreased root and shoot sensitivity to cytokinins (Plakidou-Dymock et al., 1998). A second putative receptor gene, the barley Mlo gene, encodes a protein that confers powdery mildew resistance and is predicted to contain seven transmembrane domains (Buschges et al., 1997). Mlo defines a large gene family in A. thatiana (Devoto et al., 1999). However, neither GCR1 nor Mlo has been shown to directly couple with heterotrimeric G proteins. A membrane bound protein that is capable of interacting with G protein alpha subunits has been identified in maize microsomes, but not cloned (Wise et al., 1994).

[0284] The sequence of an A. thaliana G-protein gamma subunit has recently been reported (Mason et al., 2000). G gamma subunits are typically modified by both prenylation and palmitoylation at conserved cysteine residues located near the C-terminus (Hirschman and Jenness, 1999). This modification is required for membrane localization of the G beta-gamma dimer and assembly of a functional heterotrimeric G protein. The soy and corn G protein gamma subunit sequences of the present invention have conserved cysteine residues in their C-termini that likely are involved in membrane localization of the G beta-gamma dimer and assembly of a functional heterotrimeric G protein plants. Construction of C-terminal mutants lacking these cysteine residues either by truncation or point mutation creates a protein that acts as a dominant negative effector of the activity of heterotrimeric G-proteins or at least the G protein beta-gamma subunits. It is expected that expression of truncated or mutated G proteins may result in altered plant height or growth rates.

[0285] Nucleic acid and polypeptide sequences for use in generation of transgenic crop plants having improved properties as described in the above strategy are provided in Table 1.

[0286] 24. Homologous Recombination

[0287] Transgene introgression by repeated backcrossing is limited by the rate of homologous recombination. Enhancing the rate of homologous recombination is expected to speed the introgression process and improve the quality of the resulting plant. The speed of introgression is determined by balancing the number of generations the process will take against the cost of genotyping and phenotyping exponentially increasing numbers of individuals. Increasing the rate of homologous recombination is expected to reduce the number of individuals that need to be examined to identify a plant containing the transgene and only a small segment of DNA from the donor parent. Thus, lines displaying enhanced recombination rates can be used to: 1) speed the introgression process by reducing the number of generations needed to identify a line with only the desired introgressed segment; 2) reduce the cost of the process by reducing the number of individuals screened; and 3) improve the quality of the process by increasing the frequency with which lines with only very small introgressed segments are identified.

[0288] Increased rates of homologous recombination can also be expected to enhance the conventional breeding process. Elevated recombination rates will allow rare recombinants between closely linked genes in phase repulsion to be identified more easily. This is likely to result in a more rapid rate of plant enhancement and may also allow the more extensive use of exotic germplasm as donor sources.

[0289] Increased homologous recombination rates may also improve the usefulness of gene targeting in plants or other species.

[0290] Genes involved in homologous recombination in bacterial systems have been shown to enhance recombination rates when overexpressed in plants. E. coli resolvase, ruvC, was shown to increase the rate of somatic homologous recombination in transgenic tobacco (Shalev et al., 1999). Homologous recombination in mammalian cells has been shown to be mediated by sister chromatid exchange (Sonoda et al., 1999). Expresssion of E. coli recA has been shown to increase the frequency of sister chromatid exchange and intrachromosomal recombination in transgenic tobacco (Reiss et al., 1996, 2000).

[0291] Recombination in eukaryotes is mediated by a group of proteins refered to as the RAD52 epistasis group. These genes were first identified in Saccharomyces cerevisiae and consist of RAD50, RAD51, RAD52, RAD54, RAD55, RAD57, RAD59, RDH54/TID1, MRE11, and XRS2 (Sung et al., 2000). The RAD52 group of proteins are well conserved across eukaryotes. Homologous recombination during mieosis is initiated by the formation of double stranded breaks. Breaks have been shown to cluster in intergenic regions containing transcriptional promoters in yeast (Wu and Lichten, 1994; Baudat and Nicolas, 1997). Spo11 has been suggested to catalyze double-stranded break formation during mieosis (Keeney et al, 1997). Double-stranded breaks in DNA are bound by a set of annealing exonucleases that includes recBCD (Arnold and Kowalczykowski, 2000), RecE/RecT and Red alpha/Red beta nuclease in E. coli (Muyrers et al, 2000). In E. coli these enzyme complexes convert the double-stranded break into a coated single-stranded region due to their 3′ to 5′ exonuclease activity and promote recA loading onto the single-stranded DNA and D-loop formation with homologous double-stranded DNA.

[0292] The Mre11-Rad50-Xrs2 protein complex has been suggested to convert double-stranded DNA breaks into tailed single-stranded breaks in yeast (Bressan et al., 1999). RAD52 binds directly to single stranded and double-stranded breaks in DNA and promotes homologeous recombination (Van Dyck et al., 1999; Parsons et al., 2000). In yeast the activity of RAD52 is stimulated by the presence of replication protein A (Sugiyama et al., 1998) as well as heterodimers of RAD55/RAD57 (Gasior et al., 1998). RAD51 is orthologous to bacterial RecA (Shinohara and Ogawa, 1999). RecA and RAD51 polymerize on single-stranded DNA and promote D-loop formation. RAD51 appears to differ from RecA in that it prefers tailed duplex DNA over single stranded DNA and can promote strand invasion from either the 5′ or 3′ direction (Mazin et al., 2000). RAD51 activity is also promoted by RAD54, a member of the SNF2/SWI2 family of DNA binding proteins. Double stranded DNA-activated ATPase activity in RDH54 generates unconstrained negative and positive supercoils in DNA. Efficient D-loop formation occurs with even topologically relaxed DNA, suggesting that via specific protein-protein interactions, the negative supercoils produced by RAD54 are used by RAD51 for making DNA joints (Petukhova et al., 2000).

[0293] Resolvases belonging to four distinct structural classes have been identified in prokaryotes (Aravind et al., 2000). RuvC-like proteins are found in most bacteria and include the mitochondrial resolvase Cce1 from Saccharomyces cerevisiae and its Schizosaccharomyces pombe ortholog (Ezekiel and Zassenhaus, 1993; Oram et al., 1998). The group of genes defined by E. coli YqgF is also included in the family of RuvC-like proteins. RuvC functions as a Holliday junction resolvase, by selectively nicking Holliday junctions to produce symmetrical incisions in the branched DNA structure. It typically acts in conjunction with two additional proteins, RuvA and RuvB. The second family of resolvases was identified following the cloning and biochemical characterization of an aracheal resolvase from Pyrococcus furiosus (Komori et al., 1999). Members of this family share structural similarity with RecB and □ exonuclease. The third family of resolvases in typified by bacteriophage T4 endonuclease VII (Mizuuchi et al,. 1983). The final resolvase family is characterized by the E. coli RusA protein (Chan et al., 1997). No eukaryotic nuclear resolvases have been identified to date.

[0294] It is expected that increaseing the rate of branch migration or resolution increases the available concentration of RAD51 or other proteins required for homologous recombination.

[0295] Homologous recombination rates in plants may be stimulated by: 1) Increasing the rate of double stranded break formation; or 2) Increasing the rate of entry into the homologous recombination pathway versus the ku-dependent non-homologous end-joining repair pathway. Double-stranded break formation may be stimulated by overexpression of Spo11. Stimulating the homologous recombination pathway may be achived by increasing the activity or concentration of proteins involved in the initial steps of the homologous recombination pathway such as RAD52, RAD51 or RAD54.

[0296] Nucleic acid and polypeptide sequences for use in generation of transgenic crop plants having improved properties as described in the above strategy are provided in Table 1.

[0297] 25. HSP90

[0298] Hsp90 proteins have been shown to play a role in protecting organisms from heat shock, possibly by accelerating the rate of reactivation of a select group of proteins involved in signal transduction. This has been demonstrated in A. thaliana where a mutant that fails to accumulate HSP90 has been shown to be thermosensitive and this sensitivity is reduced by overexpression of HSP90 (Ludwig-Muller et al., 2000). The protein is essential in all eukaryotes studied to date ((Nathan et al., 1997; 1999). However, little is know about the effects of overexpression of Hsp90 on thermotolerance. Overexpression of an HSP90-class chaperone or its regulators may result in increased thermotolerance. It is expected that impairment of the HSP90 pathway will increase thermotolerance as HSP90 has been reported to act as a repressor of the heat shock response in yeast (Duina et al., 1998). Likewise, alteration of HSP90 function may alter salt tolerance (Imai and Yahara, 2000) in corn.

[0299] HSP90 has also been reported to act as an evolutionary “capacitor”, buffering organisms from the effects of allelic variation in its regulatory substrates under non-stress conditions and exposing these variations for use in selection under stress conditions (Rutherford and Lindquist, 1998). Supporting this notion, HSP90 has been demonstrated to bind to a number of important signaling molecules including receptor and non-receptor tyrosine kinases, glucocorticoid-type transcription factors and various elements of MAP kinase signaling cascades and the cell cycle. This suggests that alteration of HSP90 function may have effects on plant performance other than heat tolerance. In particular, reducing HSP90 function may uncover phenotypic variation that can be used for selection in conventional breeding programs.

[0300] Corn has been reported to contain two Hsp90 family members, Hsp81 and Hsp82. Hsp81 is only mildly heat inducible in leaf tissue, but is strongly expressed in the absence of heat shock during the pre-meiotic and meiotic prophase stages of pollen development and in embryos, as well as in heat-shocked embryos and tassels. Hsp82 shows strong heat inducibility at heat-shock temperatures (37-42 degrees C.) and in heat shocked embryos and tassels but is only weakly expressed in the absence of heat shock (Marrs et al., 1993).

[0301] Hsp90 functions in concert with Hsp70, Sti1/Hop and p23 in an ATP-driven cycle that refolds or protects proteins (Young and Hartl, 2000). This interaction appears to be facilitated by tetratricopeptide repeats in HSP90 ligands (Young et al., 1998).

[0302] Hsp90 plays a role in intracellular transport of many of its ligands, a role that is likely to require Hsp90 cofactors FKBP52 or cdc37 (Pratt et al, 1999). Overexpression of either of these classes of proteins is also likely to alter Hsp90 function

[0303] Two yeast genes, Cns1 and Hch1 have also been shown to function in concert with hsp90 although their biochemical roles are not well understood (Nathan et al, 1999). Mammalian hsp90 has been shown to function in yeast, making it likely that other components of this signal transduction cascade are conserved as well (Picard et al, 1990).

[0304] CHIP (co-chaperone) has been identified as an additional HSP90 regulatory protein. Overexpression of CHIP was shown to alter the fate of the HSP90 substrate glucocorcoid receptor towards ubquitinination (Connell et al., 2001). Overexpression of CHIP in corn may lead to an alteration the level of activity associated with HSP90 substrates and either an increase in thermotolerace or an uncovering of additional variation that may be used in a breeding program.

[0305] Nucleic acid and polypeptide sequences for use in generation of transgenic crop plants having improved properties as described in the above strategy are provided in Table 1.

[0306] 26. Invertase

[0307] Kernel abortion under stress conditions has an adverse effect on yield. Zinselmeier et al. (1999) show that when the sugar stream is disrupted, as under low water potential, young embryos abort. The block appears to be at the first step in sucrose utilization, catalyzed by invertase. It is expected that improvement of the kinetic efficiency of invertase under low water conditions will lead to decreased kernel abortion, thereby increasing grain yield. Invertases from different species are tested to identify an invertase with better kinetics under low water conditions. Gene sources may include corn, sorghum, rice and Coix. The source of invertases need not be limited to higher plants (Gerday et al., 2000) and may include microbes, fungi, algae, and insect. This approach to yield increase requires both an invertase and a sink/pedicel-specific promoter. Transgenic, constitutive expression of invertase in tomato (Dickinson et al. 1991) and tobacco (von Schaewen et al, 1990) resulted in detrimental phenotypes. Corn invertase sequences are used to isolate native promoters to drive the heterologous genes. Alternatively, a glutamine synthase 1-2 (pedicel-specific) promoter which drives pedicel specific expression may be used. Other seed specific promoters such as a cytokinin oxidase (early endosperm) promoter or the bet1 promoter, specific to the basal endosperm transfer layer, are useful.

[0308] The effect of expression of invertase is expected to be production of a greater number of mature kernels per ear under drought conditions. A drought will be imposed several days before and after pollination followed by well-watered conditions for the remaining life of the plant. A kernel count per ear will be made after kernel maturation.

[0309] Nucleic acid and polypeptide sequences for use in generation of transgenic crop plants having improved properties as described in the above strategy are provided in Table 1.

[0310] 27. Jasmonate

[0311] Jasmonates have been identified as natural compounds occurring throughout the plant kingdom which affect many developmental processes such as senescence, germination, tuber formation, pollen fertility, fruit ripening, insect and disease resistance, drought, cold and salinity tolerance (Creelman, 1997). Jasmonates are linolenic acid (18:3) derived plant growth regulators or phytohormones. The biosynthesis pathway of jasmonates is known and many of it's enzymes have been cloned or purified (Farmer, 1998). The natural jasmonates are (−)-jasmonic acid (JA), its stereoisomer, (+)-7-isoJA and the volatile methyl ester of (−)-JA The biosynthesis of jasmonates begins with a conversion of linolenic acid to 13-hydroperoxylinolenic acid by lipoxygenase (LOX). Plant membranes contain a high concentration of linoleic acid and it has been postulated that increased levels of JA may result from the release of linolenic acid from phospholipids catalyzed by phospholipase. Phospholipases prefer oxygenated fatty acids before further metabolism (Banas, 1992). The lipoxygenase (LOX) pathway oxidizes alpha-linolenic acid and releases it from membrane bound phospholipids for the synthesis of JA. AtLOX1 and AtLOX2 have been identified in Arabidopsis thaliana (Melan, 1993). AtLOX2 is localized in the chloroplast and is required for the wound-induced synthesis of jasmonates in transgenic Arabidopsis leaves (Bell, 1995).

[0312] Linolenic acid is a substrate for allene oxide synthase (CYP74/AOS) which catalyses the formation of 12-oxo-phytodienic acid (JA precursor) (Laudert, 1996). Wounded transgenic tobacco and Arabidopsis thaliana plants overexpressing CYP74 accumulated significantly more JA than wounded, untransformed control plants (Laubert, 2000; Kubigsteltig, 1999). Allene oxide cyclase converts the unstable allene epioxide precursor to 12-oxo-phytodienoic acid (OPDA). Jasmonic acid is synthesized from OPDA by reduction of the double bond of OPDA by OPDA-reductase (OPR). Isoenzymes OPR1, OPR2 were cloned from A. thaliana (Biegen, 1998). A third isoenzyme OPR3 has been recently identified as a brassinosteroid-upregulated gene that is responsive to a variety of stimuli (Mussig, 2000). A recent study identified OPR3 as the isoenzyme involved in JA biosynthesis (Schaller, 2000). Additionally, OPR3 has been recently confirmed as being a potential link between brassinosteroid-action and jasmonic acid synthesis as OPR3 expression increased with the application of brassinolide (Mussig, 2000).

[0313] The natural accumulation of JA varies as a function of tissue and cell type, developmental stage and in response to environmental stimuli. Higher levels are found in zones of cell division such as floral and reproductive structures compared to zones of cell elongation in more mature tissue, such as the stem. Jasmonate levels are rapidly and transiently increased by mechanical perturbations such as wind, touch or wounding. Levels also increase in response to turgor reduction (Creelan, 1995). Foliar application of methyl-JA (MJ) reduces both glycolipid and phospholidid content of strawberry leaves as compared to nonstressed controls. MJ was effective in lessening the decline in the unsaturated:saturated fatty acid ratio and in maintaining a higher percentage of unsaturated membrane lipids under water stress conditions in both glycolipids and phospholipids. Transpiration levels were reduced, peroxidation levels were reduced and ascorbic acid levels remained constant in treated plants compared to controls (Wang 1999). Reduction of chilling injury and osmotic streses by JA has been reported in rice, peanut seedlings and cucumbers (Lee, 1996; Pan, 1995; Wang, 1994). Exogenous treatment of barley seedlings with JA diminished the inhibitory effect of high salt concentration on growth and photosynthesis (Tsonev, 1997).

[0314] Overexpressed levels of the CYP74, OPR3, and atLOX2 genes in Zea mays L. is expected to result in plants with higher endogenous levels of jasmonates and an improved tolerance to abiotic and biotic stresses.

[0315] Jasmonic acid signaling has been identified as playing a role in reducing salicylic acid (SA) concentrations and abolishing ozone-induced, SA dependent cell death. Ozone accumulates naturally in the extracellular spaces and spontaneously dissociates generating reactive oxygen species, thereby damaging the cell during exposure to stress. Ozone reacts primarily with the plasma membrane and causes alterations in lipid composition that produce a higher concentration of linoleic acid. High levels of exogenously applied JA decreased ozone-induced concentrations of hydrogen peroxide in tobacco (Rao, 2000). The oxidative burst that accompanies a plant's response to stress may induce JA by producing oxidized fatty acids. JA in turn induces genes involved in defense responses. The role of reactive oxygen species and JA as mediators in response to pathogen attack and wounding is well documented (Low, 1996; Seo, 1997; Wasternack, 1997).

[0316] The production of ethylene in mesocarp tissue of winter squash is induced by mechanical wounding. A cDNA fragment WSACS2 was isolated from the wounded tissue. The sequence of WSACS2 was highly similar to the wound-inducible ACC synthase that catalyzes ethylene production. Methyl jasmonate stimulated WSACS2 synthesis in wounded tissue (Watanabe, 1998). This is consistent with reports that JA and ethylene synergistically activate defense genes (Xu, 1994; Schweizer 1997; Watanabe 1998).

[0317] It is believed that the jasmonate pathway is involved in plant responses to biotic stresses. The gene PDF1.2 is involved in fungal resistance in A. thaliana (Staswick, 1998) PDF expression is induced by JA, ethylene and oxygen radical generators such as paraquat and rose bengal (Penninckx, 1998

[0318] Leaf tissues of barley responded to JA application by inducing gene expression of JIPs or jasmonate-induced proteins (JIPs). JIP60 was identified as a ribosome-inactivating protein present in stressed leaf tissue. JIP's down regulate genes that encode “late embryogenesis” (LEA) proteins that are thought to mitigate changes in the leaf due to drought stress (Gorschen, 1997; Reinbothe, 1997).

[0319] The atEXT1 gene, encoding an extension protein, is also induced by MJ in response to wounding. Hydroxyproline-rich glycoproteins (extensins) are abundant in plant cell walls. It is believed that extensins are synthesised in response to wounding or pathogen attack and their function is to reinforce the cell wall by intermolecular cross-linking of tyrosines on adjacent monomers. The atEXT1 gene is normally expressed in the root, but not in the leaf. There are promoter motifs that are activated by salicylic acid, abscisic acid and methyl jasmonate during leaf wounding stress, resulting in the expression of extensins (Merkouropoulos, 1999).

[0320] COI1 has been recently identified as a gene required for jasmonate response in Arabidopsis. The COI1 protein contains 16 leucine-rich repeats (LLRs) and an F-box motif similar to other signaling pathway proteins. The F-box proteins function as receptors that selectively recruit repressor proteins required for the removal of substrates by ubiquitination. This study speculates that COI1 recruits regulators of defense response for this function (Xie, 1998).

[0321] Overexpression of jasmonate signaling and induced genes (COI1, atEXT1, JIP60, PDF1.2, WSACS2) in Z. mays is expected to result in plants with higher levels of these proteins during periods of abiotic and biotic stress resulting in greater stress tolerance.

[0322] Nucleic acid and polypeptide sequences for use in generation of transgenic crop plants having improved properties as described in the above strategy are provided in Table 1.

[0323] 28. Nitric Oxide

[0324] Biochemical, physiological and molecular experiments suggest that nitric oxide (NO) may play a role in agronomically important traits in corn such as kernel maturation, leaf sensecence, disease resistance, root growth or photomorphogenic responses. Removal of endogenous NO by overexpression of NO detoxifying enzymes can be expected to elucidate the role(s) NO plays in the expression of agronomic traits in corn. Overexpression of enzymes activated by NO may also be expected to yield similar results. In both cases agronomic traits may also be improved by either a reduction in nitrosative stress or an amplification of NO signaling.

[0325] Nitric oxide has been shown to play a major role as a signaling molecule in animal systems (Ignarro, 2000). In contrast, many different roles for NO in plant sigaling have been suggested, but the proposed plant signaling pathways are not well understood (Wojtaszek, 2000). For example, nitric oxide has been reported to mediate photomorphogenic responses in wheat, lettuce, potato and A. thaliana (Beligni and Lamattina, 2000), promote root elongation in corn (Gouvea, 1997), and to promote ripening in strawberry and avocado (Leshem and Pinchasov, 2000). Involvement of NO in the tobacco defense response is perhaps the best-documented role played by nitric oxide in plant signaling (Klessig et al., 2000; Foissner et al., 2000).

[0326] Plants have been reported to contain nitric oxide synthase (Barroso et al., 1999), based on immunological cross reactivity with nitric oxide synthase (NOS) from other species (Lo et al., 2000). Some alternative NO generating proteins also appear to exist in plants. A. thaliana contains a protein (CAB51217) that is related to the br-1, a snail nitric oxide synthase that does not share homology with mammalian NOS (Huang et al., 1997). Corn nitric reductase has also been reported to generate NO (Yamasaki and Sakihama, 2000).

[0327] Flavohemoglobins, chimeric flavohemoproteins composed of a single polypeptide having both a single heme and FAD (Poole and Hughes, 2000), have been reported to provide protection from nitrosative stress in yeast (Liu et al., 2000) and E. coli (Membrillo-Hernandez et al., 1999). Overexpression of proteins of this class can be expected to provide protection from NO when expressed in specific subcellular compartments and also to quench NO signaling pathways.

[0328] It is expected that alteration of expression of genes involved in NO signaling pathways may affect kernel maturation, thereby contributing to enhanced yield, contribute to increased disease resistance, increase root growth, thereby enhancing water stress resistance, or effect photomorphogenic responses leading to, for example, reduced shade avoidance and an increase of yield by use of increased planting densities.

[0329] Nucleic acid and polypeptide sequences for use in generation of transgenic crop plants having improved properties as described in the above strategy are provided in Table 1.

[0330] 29. Photomorphogenic Responses

[0331] Transcriptional profiling was used to identify a gene, nonphototropic hypocotyl 1 (NPH1), which encodes a blue light receptor and is involved in a plant's photomorphogenic response. In Arabidopsis, NPH1 acts as classic Pr-Pfr form of phytochrome by autophosphorylating and de-phosphorylating. In Pfr form (phosphorylated), NPH1 is capable of phosphorylating down-stream signal transduction components, such as NPH2, 3, 4 and auxin response genes. NPH1 is also known to respond to light by reducing the elongation rate of the stem and other organs.

[0332] The cDNA of NPH1 was isolated from maize. It is expected that light insensitive overexpression of NPH1 in maize will improve plant architecture and increase hybrid vigor. Overexpression may also produce plants that have improved light perception.

[0333] Current studies have shown that NPH1 contains the LOV1, and LOV2 domains and a Ser/Thr protein kinase domain at its C-terminal. The NPH1 kinase domain contains the 11 sequence motifs typical of protein kinases and falls into the AGC (PVPK1) family of Ser/Thr protein kinase within the protein kinase C group. Among the 11 protein kinase sub-domains, sub-domain VIII appears to play a major role in the recognition of peptide substrates. Many protein kinases are known to be activated by phosphorylation of residues in the activation loop between sub-domain VII and VIII. The group C protein kinases tend to phosphorylate substrates at serine/thereonine residues lying very close to the argunine and lysine residues. Using site directed mutagenesis, three mutant NPH1 genes were made by changing serine residues at 849 and/or 851 into aspartic acid residues (Mut1-NPH1, Mut2-NPH1 and Mut1Mut2-NPH1, respectively).

[0334] Nucleic acid and polypeptide sequences for use in generation of transgenic crop plants having improved properties as described in the above strategy are provided in Table 1.

[0335] 30. Phosphate Uptake

[0336] Phosphorus makes up about 0.2% of a plant's dry weight and is a key macronutrient for the production of nucleic acids, phospholipids and ATP. Phosphate is also involved in controlling key enzyme reactions and metabolic pathway regulation. Total phosphorous in the soil is usually high but more than 80% of soil phosphorous is present in unavailable forms for plant uptake, because it is adsorbed to soil particles, or held in inorganic or organic forms. Inorganic phosphate interacts with other elements such as aluminum and iron in acid soils, and calcium and magnesium in alkaline soils. The majority of applied fertilizer phosphorous may be fixed in the soil, forcing farmers to apply many times more than is necessary for crop production, leading to phosphorous run off from agricultural fields that is deleterious to ecosystems. The available phosphorous is taken up by the plant by diffusion. The rate of diffusion is slow which creates a zone around the root that is phosphorous depleted (Holford, 1997).

[0337] Plants have consequently developed highly specialized mechanisms in response to consistently low levels of available phosphate in the rhizosphere. Responses for enhanced phosphate uptake include secretion of organic acids and phosphatases into the rhizosphere, and the activation of induced novel genes, phosphate transporters, RNases and apyrases (Raghothama, 1999).

[0338] An Arabidopsis thaliana mutant lacking a phosphate starvation induced (psi) phosphatase has been cloned and represents evidence that plant roots excrete phosphatases in response to inorganic phosphate starvation (Trull and Deikman, 1998). Phosphate starvation induced phosphatases are acid phosphatases that release phosphate from forms bound in organic matter and the phosphate ester pool of the plant (Huang, 2000). An Arabidopsis psi gene (AtACP5) was cloned and its activity is highly induced under phosphate limiting conditions. AtACP5 was purified from plants starved of phosphate for 10 days (Del Pozo et al., 1999). AtACP5 is a member of a class of dinuclear metallo purple phosphatases (Doi, 1998), which are responsible for the scavenging of active oxygen species. AtACP5 is also induced by stimuli such as ABA, high salt and H2O2. Purple phosphatases have been found in both the aerial parts and roots of the plant (Haran, 2000). It is expected that overexpression of AtACP5 in Zea mays L. will result in more available phosphate for uptake by the resulting in a more vigorous, higher yielding plant.

[0339] Maize is reported to have at least three acid phosphatases (El-Metainy and Omar, 1981) that may represent the reported plasmalemma, vacuolar and nuclear forms (Deltour et al., 1981).

[0340] Yeast acid phosphatase, pho5 (GenBank Accession Number X0 1079), may also perform the same role as the plant enzymes when secreted.

[0341] Plants also release organic acids in response to phosphate starvation. Organic acids lower the soil pH and release phosphate from inorganic complexes such as calcium and magnesium phosphates. Plants produce and secrete citrate, malate and oxalate for this purpose. Overexpression of citrate synthase (ACS) in Nicotiana tabacum enhanced use of insoluble phosphorous compounds upon secretion of greater levels of citrate. Furthermore, citrate-overproducing plants yielded significantly greater leaf and fruit biomass when grown in phosphorous-limiting soils (Lopez-Bucio, 2000). Citrate is a chelator of aluminum, calcium, and iron. Therefore, overexpression of citrate synthase also helps plants alleviate aluminum toxicity in acid soils. Organic acids such as citrate are known to enhance the availability of reduced or ferrous iron required by plants. Increased secretion of citrate also provides a carbon source for microorganisms in the soil, thereby increasing microbial release of phosphate from organic sources (Raghothana, 1999). It is expected that overexpression of citrate synthase in Z. mays will result in a higher concentration of phosphate available to the plant when soil phosphate availability is low. Overexpression of both mitochondrial and cytoplasmic forms of citrate synthase has been reported to improve phosphate uptake in model plants (Lopez-Bucio et al., 2000; Koyama et al., 2000). A mitochondrial form of rice citrate synthase (GenBank Accession Number AF302906) has been identified.

[0342] Another class of proteins that has been shown to increase under phosphorous limiting growth conditions is ribonucleases (RNases). S-like RNases release inorganic phosphate from RNA molecules in the intracellular matrix of the cell and are also secreted into the rhizosphere to release inorganic phosphate from RNA in soil organisms. RNases are involved in the turnover and degradation of RNA and it has been shown that they are induced in response to diverse stresses such as seed germination, water stress, wounding, pathogen infection, xylogenesis and phosphate starvation (Raghothana, 1999). RNases have been grouped according to their sequence and function. The function of S-RNases is gametophytic self-incompatibility whereas S-like RNases have been reported to be induced by diverse stresses. A barley (Hordeum vulgare L.) S-like RNase gene, RSH1, was recently cloned (Gausing, 2000). In cultivated tomato (Lycopersicon esculentum), two ribonucleases genes, extracellular located RNase LE and intracellular located RNase LX, are induced in response to phosphate depletion of the cultivation medium. The Arabidopsis thaliana ribonuclease gene, RNS1-3, is also induced in response to phosphate starvation (Bariola, 1994). S-like RNases have also been induced by phosphate starvation in Nicotiana alata (Dodds, 1996). It is believed that overexpression of an S-like RNase gene, such as the RSH1 gene, in Z. mays will result in a plant that is more resistant to phosphate starvation.

[0343] The uptake of phosphate at low concentrations poses an additional problem for plants. Phosphate rarely exceeds 10 μM in the soil and it diffuses very slowly, therefore requiring the plant to have specialized transporters. Other mechanisms for transporting phosphate across membranes between intracellular compartments are necesssary, because the concentration of phosphate is 1000-fold higher in these compartments than in the external solution. Higher plants generally store phosphate in the vacuole, where under non-limiting phosphorous conditions 85% to 95% of cellular phosphate is stored. However, the maintenance of a minimal level of phosphate in the cytosol is critical for normal metabolism, as phosphate concentration becomes a rate-limiting step in oxidative phosphorylation or the production of ATP. Additionally, phosphate is a key metabolite in the Calvin cycle, the sucrose synthesis pathway and a key part of adenylates and nucleotides. Cytoplasmic phosphate is maintained at a constant level (homeostasis) at the expense of vacuolar phosphate. Phosphate transport across the tonoplast is activated in response to lowered phosphate concentration and cytoplasmic alkalization (Chrispeels, 1999).

[0344] Phosphate is transported across the tonoplast and taken up by plant roots actively (requiring membrane H+-ATPase) by high-affinity transport proteins at low phosphate concentrations and low-affinity transporters when concentrations are high. The low-affinity transporters are expressed constitutively whereas the high-affinity transporters are induced under phosphate starvation conditions (Schachtman, 1998).

[0345] In addition to a possible role in phosphate scavenging, apyrase has been demonstrated to play a role in regulating the glycosylation state and activity of proteins in the Golgi apparatus (Gao et al., 1999; Zhong et al., 2000). This suggests that overexpression of apyrase proteins may have other effects on plant growth and development.

[0346] Phosphate transport has been reported to be augmented by apyrase when additional phosphate is supplied in the form of ATP. Apyrase scavenges phosphate from xATP by hydrolyzing and mobilizing the gamma-phosphate without promoting the transport of the purine or the ribose. Most apyrase are plasma membrane proteins but studies with the pea (Pisum sativum) gene, psNTP9, indicate that it is also extracellular. It is believed that apyrase may function to release inorganic phosphate from ATP present in the soil and mobilize it for plant uptake (Thomas, 1999). It is expected that overexpression of psNTP9 in Z. mays will result in an increased amount of soil phosphate from organic sources made available for plant uptake, thereby increasing plant vigor.

[0347] High affinity phosphate transporter genes (APT1 and APT2 (Smith 1997) and AtPT4 (Lu, 1997)) were isolated from Arabidopsis. Transporter genes have also been isolated from tomato (Liu, 1998) and potato (Leggewie, 1997). Sequence similarity between these plant transporter genes is high. It has been demonstrated that plants increase their capacity for phosphate transport across both the plasma membrane and the tonoplast during phosphate starvation by the increased expression of the transporter genes. Overexpression of tomato high-affinity transporter genes in tobacco resulted in higher levels of phosphate uptake during phosphate starvation (Mitsukawa, 1997). It is expected that overexpression of APT1, APT2 and AtPT4 in Z. mays will result in a plant with more vigorous growth during times of phosphate stress.

[0348] A low-affinity transporter gene, Pht2;1, has been cloned from Arabidopsis. The gene is predominantly expressed in green tissue and the amount of protein stays constant regardless of phosphate concentration. Its primary function appears to be phosphate loading of the leaf (Daram, 1999). It is believed that overexpression of Pht2;1 in Z. mays may result in higher cytosolic and mitochondrial levels of phosphate, thereby producing a more vigorous corn plant.

[0349] Phosphate starvation induces the expression of novel genes in the roots. One such gene was isolated from Medicago truncatula, MT4 (Burleigh, 1997). The MT4 gene shares sequence identity with the tomato gene TPSI1 (Liu, 1997) and the Arabidopsis AT4 gene. The proposed function-of these genes is to assist in phosphate acquisition during times of phosphate stress. It is believed that overexpression of the AT4 gene in Z. mays will result in corn plants more tolerant to low availability of phosphate in the soil.

[0350] Nucleic acid and polypeptide sequences for use in generation of transgenic crop plants having improved properties as described in the above strategy are provided in Table 1.

[0351] 31. Phytochrome

[0352] Increased planting density has significantly contributed to gains in corn yield (Russell, 1991; Duvick, 1984). However, grain yield is observed to decrease once an optimal planting density is exceeded. The decrease in grain yield may be due to a reduction in the total amount of energy available to each plant but may also be due to phytochrome-mediated shade avoidance responses.

[0353] Manipulation of the shade avoidance response may allow corn plants to be grown at higher planting density and thus increase overall corn yield. Phytochrome has also been reported to regulate flowering time in many species including sorghum, barley and rice (Childs et al., 1991; Hanumappa et al., 1999; Izawa et al., 2000). This suggests that modulation of phytochrome response pathways may also be used to alter flowering time in maize.

[0354] The shade avoidance response is well studied in dicots (Neff et al., 2000; Morelli and Ruberti 2000). This response typically involves an elongation of the internode and a strengthening of apical dominance. Light enriched in far red due to absorption of red light by chlorophyll is thought to be perceived by both phyB and phyA (Reed et al., 1993; Casal, 1996; Shinomura et al., 2000) with some contributions by phyE and phyD in A. thaliana (Devlin et al., 1998; Devlin et al., 1999). Signals generated by the activated phytochrome proteins are relayed through a variety of different proteins including FAR1 (Hudson et al., 1999), NDPK2 (Tanaka et al., 1998; Choi et al., 1999; Pan et al., 2000), PIF3 (Ni et al., 1999; Halliday et al., 1999b), SPA1 (Hoecker et al., 1998), PKS1 (Fankhauser et al., 1999), PAT1 (Bolle et al., 2000), and AtHB-2 (Steindler et al., 1999). Several different models have been proposed to explain these complex signaling pathways, but insufficient information is available to build comprehensive pathway models.

[0355] In contrast to the dicots, much less is known about shade avoidance responses in monocots. Most of the available information comes from the study of a sorghum line deficient in phyB. The ma3 sorghum mutant lacks phyB and exhibits a constitutive shade avoidance phenotype similar to phyB mutant dicots. The plants have elongated shoots, low cholorophyll content and flower early (Childs et al., 1991). They also have altered gibberillic acid (GA) and ethylene production (Lee et al., 1998; Finlayson et al., 1999). Barley and rice deficient in phyB or heme oxidase, respectively, have also been described as early flowering, but have not been further characterized (Hanumappa et al., 1999; Izawa et al., 2000). In contrast to tobacco, where overexpression of phyA has been shown to repress the shade avoidance response and increase leaf yield (Robson et al., 1996), overexpression of phyA in rice did not result in dramatic phenotypic changes (Clough, 1995).

[0356] Overexpression of phyA has been reported to confer a short, dark green phenotype in many dicots. This has been associated with an increase in leaf yield in transgenic tobacco (Robson et al., 1996), antagonism of the shade avoidance response in potatoes (Heyer et al., 1995) and alteration of flowering time in A. thaliana (Bagnall et al., 1995). PhyA induced dwarfing is associated with a reduction in GA levels and can be repressed by the addition of exogenous GA (Jordan, 1995).

[0357] Overexpression of phyA in corn is expected to produce shorter, darker corn plants that may produce more ears per plant due to a reduction of apical dominance and GA levels. However, overexpression of oat phyA in rice did not result in dramatic phenotypic changes (Clough, 1995). PhyA has also been demonstrated to play a positive role in the shade avoidance response (Casal, 1996; Shinomura et al., 2000). Taken together with the lack of phenotype reported for rice, it may also be desirable to repress phyA in corn plants. Amino-terminal truncation of a rice phyA gene has been reported to inactivate endogenous phyA in tobacco (Emmler et al., 1995). Similar truncations can be used to inactivate phyA in corn.

[0358] Transgenic plants overexpressing phyB are reported to have reduced hypocotyl length and increased chlorophyll content. In transgenic potato, overexpression of phyB has been reported to increase total plant photosynthesis, reduced the rate of senescence and increased tuber yield (Thiele et al., 1999). PhyB overexpression has also been reported to alter flowering time in A. thaliana (Bagnall et al., 1995).

[0359] Overexpression of phyB in corn is expected to produce shorter, darker corn plants that may be higher yielding under high-density conditions due to a repression of the shade avoidance response or increased photosynthetic capacity. Reduction of phyB activity by the creation of a dominant negative amino-terminal truncation is expected to reduce corn flowering time.

[0360] Overexpression of phyC in A. thaliana and tobacco has been reported to increased leaf expansion rates (Qin et al., 1997; Halliday et al., 1997). This suggests that overexpression of phyC in corn might increase overall plant performance by rapidly increasing the amount of available photosynthetically active leaf area.

[0361] Heme oxidase is a plastid-localized enzyme that catalyzes the oxidative conversion of heme to biliverdin IX, the first committed step in phytochromobilin biosynthesis. A. thaliana and rice heme oxidase mutants, hy1 and se5, are devoid of active phytochrome (Muramoto et al., 1999; Davis et al., 1999; Izawa et al., 2000). The effects of these mutants have been mimicked by localized depletion of phytochrome activity by expression of mammalian biliverdin IX reductase, which degrades the phytochrome chromophore (Montgomery et al., 1999).

[0362] Knockout of the corn heme oxidases or degradation of the chromophore or intermediates in its metabolism would be expected to impair phytochrome-mediated responses in corn. This could lead to either a shift in flowering time or a reduction in the shade avoidance response.

[0363] The only reported biliverdin IX reductases are human and rat. However, a sequence with low, but significant homology, to biliverdin IX reductases has been reported in the Synechocystis genomic sequence (GenBank Accession No. S74645). Overexpression of this protein should result in a phytochrome deficient phenotype in maize.

[0364] A. thaliana spa1 mutants are hypersensitive to light signals perceived by phyA, suggesting that spa1 acts as a negative regulator of phyA signaling (Hoecker et al., 1998, 1999). SPA1 contains an N-terminal domain with a protein kinase motif and a C-terminal domain with at least 5 WD40 repeats. Overexpression of spa1 is expected to suppress phyA signaling and act to repress the shade avoidance response or delay flowering.

[0365] Nucleoside diphosphate kinases (NDPKs) are responsible for the exchange of gamma-phosphate residues between di- and triphosphonucleosides. They are known to play important roles in cellular signaling processes, lipid metabolism and carbohydrate metabolism. Humans have at least six nucleoside diphosphate kinases (nm23-H1 through nm23-H6). These proteins have been shown to play important roles in differentiation, metastasis and apoptosis. In many cases NDPK activity is modulated through interactions with other proteins. Likewise, interaction with NDPK has also been reported to modulate the activity of a number of proteins. NDPK has recently been shown to bind to and become activated by the Pr form of phytochrome (Choi et al, 1999). This observation, coupled with the observation that NPDK becomes rapidly phosphorylated upon exposure of etiolated seedlings to red light (Tanaka et al., 1998) and the inhibition of phytochrome induced cell elongation in rice plants with reduced levels of NDP kinase (Pan et al., 2000), suggests that nucleotide diphosphate kinases are direct mediators of light signals perceived by phytochrome.

[0366] Overexpression of NDP kinases in plants can be expected to induce many different phenotypes. However, it is possible the expression of either a native or an activated version of the protein may enhance phyB signaling and suppress the shade avoidance response.

[0367] A far red impaired response (FAR1) mutant was isolated in a screen for A. thaliana mutants which failed to respond to continuous far red light (Hudson et al 1999). As phyA alone is believed to mediate responses to continuous far red light in Arabidopsis (Dehesh et al., 1993), the genes identified in this screen are predicted to be impaired in phyA signalling. The far1 locus is said to encode a nuclear localized protein of unknown function. The sequence of the predicted FAR1 protein is closely related to many transposase sequences including maize jittery and mutator transposases. This information, coupled with the observation of a simple frame shift in the reported FAR1 mutant suggests that the gene identified as FAR1 may not be correct or may act in a manner which is unlikely to be reproducible in other species.

[0368] Overexpression of FAR1 is expected to simulate signals perceived during high fluence far red irradiation. This could mimic the shade avoidance response or delay flowering. Alternatively, deletion of these genes might block such signals and inhibit the shade avoidance response or hasten flowering.

[0369] Phytochrome A signal transduction 1 (PAT1) was identified in a screen similar to that used to isolate far1. A. thaliana seedlings from a T-DNA tagged population were screened for a failure to respond to continuous far red light (Bolle et al., 2000). The encoded protein is a novel member of the GRAS protein family. Other GRAS family members include scarecrow, gibberellin insensitive, repressor of gal in A. thaliana and d8 in maize (Pysh et al., 1999) and are involved in GA signal transduction and lateral patterning. The T-DNA insertion in PAT1 leads to the production of a truncated protein that may act in a dominant negative fashion.

[0370] Overexpression of full length PAT1 is expected to increase responsiveness to far red light and potentially hasten flowering. In contrast, overexpression of a truncated PAT1 orthologue or homologue would be expected to reduce sensitivity to far red light and potentially dampen the shade avoidance response. Disruption of the gene would be expected to have a similar phenotype.

[0371] Phytochrome kinase substrate 1 (PKS1) is a soluble protein of unknown function. It was identified in a yeast two-hybrid screen and found to interact with the C-terminal domain of phyA and phyB. PKS1 is phosphorylated by phyA and phyB in a light dependent manner. No effects were observed in transformants expressing anti-sense constructs of PKS1. However transformants overexpressing PKS1 were found to have elongated hypocotyls when grown in white light or red light. Because sensitivity to far red light was maintained, has been suggested that PKS1 can act as a negative regulator of phyB signaling (Fankhauser et al., 1999). Overexpression of PKS1 or homologous genes is expected to affect phyB signaling and thereby accelerate flowering time and alter the shade avoidance response. A single PKS-like sequence has been identified in the sequence of rice BAC 60A14 (accession AC021893).

[0372] Phytochrome interacting factor 3 (PIF3) is a b-HLH protein that was identified in a yeast two-hybrid screen for proteins able to interact with the C-terminal domain of phyA and phyB. Overexpression of PIF3 marginally increases sensitivity to continuous red and far red light as measured by hypocotyl extension rates (Ni et al., 1998). PIF3 is allelic to photocurrent1 (poc1), a T-DNA induced overexpression mutant that displays a phenotype similar to the PIF3 transgenic plants (Halliday et al., 1999). Overexpression of PIF3, or its corn homologues, is expected to increase sensitivity to red or far red light and potentially mimic a phyA or phyB overexpression phenotype. Supression of PIF3 expression, or its corn homologues, is expected to reduce sensitivity to red or far red light and potentially reduce the shade avoidance response or alter flowering time.

[0373] The PAS domain of PIF3 has been shown to interact directly with phyB (Zhu et al., 2000), suggesting that other PAS domain proteins may also interact with phytochrome and modulate it's responses. Overexpression of PAS domain proteins is expected to alter phytochrome responses and improve crop performance.

[0374] Expression levels of ATHB-2, a homeobox-leucine zipper class transcription factor, have been show to respond to the red/far red light ratio in which the plant is grown (Carabelli et al., 1993). A. thaliana plants overexpressing the protein show reduced cotyledon and hypocotyl expansion in a manner such as that of plants grown in environments enriched in far red light, thereby suggesting that ATHB-2 may act to mediate the shade avoidance response.

[0375] Disruption of corn ATHB-2 is expected to reduce the shade avoidance response and allow corn to better tolerate higher planting densities.

[0376] HY5 is a bZIP type transcription factor that has been shown to mediate high-irradiance light activation of gene expression was observed in both photosynthetic and nonphotosynthetic tissues (Chattopadhyay et al., 1998). HY5 interacts directly with COP1 (Ang et al., 1998) and is regulated by phosphorylation which alters its stability (Hardtke et al., 2000; Osterlund et al., 2000).

[0377] Overexpression of HY5 is expected to mimic high light environments and repress some aspects of the shade avoidance response.

[0378] Nucleic acid and polypeptide sequences for use in generation of transgenic crop plants having improved properties as described in the above strategy are provided in Table 1.

[0379] 32. TOR Pathway

[0380] The TOR (Target of Rapamycin) signaling pathway in yeast plays a central role in regulating the transcription of genes involved in nitrogen assimilation, translation of genes involved in the cell cycle, ribosome biogenesis and amino acid permease stability in response to nutrients (especially nitrogen). Two P1 kinase homologs, TOR1 and TOR2, are the key components in the pathway. Functional homologs have been identified in human and C. elegans.

[0381] Through a database search, 10 P1 kinase homologs in Arabidopsis were identified. Most of them are potential homologs of P13,4 kinase. One of them (GenBank Accession Number AAF76442) is 52% similar overall to yeast TOR1. It is likely that this gene is the functional homolog of yeast TOR1.

[0382] The TOR signaling pathway is involved in nitrogen sensing in yeast. Since homologs of TOR kinase have been identified in Arabidopsis, it is likely that a similar pathway exists in higher plants. An Arabidopsis homolog of TAP42 (another component in the TOR pathway), TAP46, was identified using a yeast two hybrid system. This further supports the hypothesis that a TOR-like pathway may exist in plants.

[0383] The discovery that plants may have a TOR pathway is significant. It indicates that yeast, C. elegans, humans and plants may share the same pathway for nutrient sensing and couple the nutrient availability with cell division, translation, transcription, protein degradation as well as many morphological changes. Furthermore, the key components in the TOR pathway including TOR kinase and TAP46 are potential targets for improvement of nitrogen assimilation and stress resistance in crops.

[0384] FAP1 is a putative FKBP12 ligand related to Drosophilia shuttle craft and human FN-X1 containing at least 7 zinc finger-NF—X1 domains (Kunz et al., 2000). Interaction of FAP1 with FKBP12 is blocked by rapamycin. This class of zinc finger proteins has been postulated to play a role in protein ubquitination (Lorick et al., 1999).

[0385] FAP48 and FIT37 are FKBP12 interacting proteins that have been identified in human and A. thaliana (Chambraud et al., 1996; Faure et al., 1998). Like FAP1, interaction with FKBP12 is blocked by rapamycin. Sequence identity between FAP48 and FIT37 is low, but the function is conserved.

[0386] TAP46 and TAP42 are A. thaliana and yeast proteins that interact with PP2c in a TOR dependent manner (Di Como and Arndt. 1996; Harris et al., 1999). TAP42 is an essential protein and it's interaction with protein phosphatases is associated with cell growth (Jiang and Broach, 1999). Sequence identity between TAP46 and TAP42 is low, but the function is conserved.

[0387] eIF4E -4E-BP1 (also known as PHAS-1) is a key element in a regulatory system that governs translation initiation by controlling the availability of eIF4E1. One of the first steps in initiation involves binding of eIF4E to the m7GpppN cap, which is found at the end of almost all eukaryotic mRNAs. eIF4E also binds to eIF4G, a scaffold protein that organizes several other important initiation factors, including eIF3, which links the complex to the 40 S ribosomal subunit (Gingras et al., 1999). Nonphosphorylated PHAS-I binds tightly to eIF4E, preventing its association with eIF4G. When phosphorylated in the appropriate sites PHAS-I dissociates, allowing eIF4E to engage eIF4G to form the complex that facilitates initiation. PHAS-1 may be phosphorylated by TOR in vivo (Mothe-Satney et al., 2000).

[0388] Overexpression of eIF4E may mimic some of the effects of TOR activation by increasing levels of the free protein. Consistent with this idea, overexpression has been shown to transform mammalian cells and the protein is overexpressed in many human cancers (Zimmer et al., 2000; Haydon et al., 2000, Li et al., 1997).

[0389] The yeast 14-3-3 proteins BMH1 and BMH2 act as multicopy suppressors of the growth-inhibitory phenotype caused by rapamycin in budding yeast (Bertram et al., 1998). This may be due to a direct interaction between the proteins and TOR (Mori et al., 2000) or an indirect effect on proteins downstream of TOR (Cotelle et al., 2000).

[0390] Overexpression of BMH1 or BMH2 may mimic some of the effects of TOR activation either by enhancing signaling or protecting proteins that are normally degraded upon nutrient starvation.

[0391] It is expected that expression of genes relating to the TOR pathway will enhance nitrogen assimilation, chance yield by altering the cell cycle, or enhance the amino acid composition of a plant. Nucleic acid and polypeptide sequences for use in generation of transgenic crop plants having improved properties as described in the above strategy are provided in Table 1.

[0392] 33. Plant Hemoglobins

[0393] Hemoglobins are ubiquitous oxygen-binding heme proteins that consist of a globular apoprotein and a iron-binding heme group (cofactor) which is associated with this apoprotein (either covalently or noncovalently) to form hemoglobin. They are found in prokaryotes, fungi, plants and animals and are distinguished from other oxygen-binding heme proteins by their sequence similarity. Plant and animal hemoglobins diverged from a common ancestor approximately 1.4 billion years ago (Brown et al., 1984).

[0394] In legume nodules, hemoglobins (commonly called leghemoglobins) are present in high concentrations and function to maintain a high level of oxygen supply to the mitochondria. This is necessary to produce the high levels of ATP required for nitrogen fixation while at the same time ensuring that the oxygen is sequestered away from nitrogenase, which is very sensitive to inhibition by oxygen. In plants that do not form symbiotic relationships with nitrogen fixing bacteria, hemoglobins are expressed during periods of low oxygen availability or high energy demand (Duff et al., 1998)

[0395] In previous studies, transgenic tobacco plants expressing functionally different hemoglobins have been produced (Dieryck eet al., 1997; Holmberg et al., 1997; Bulow et al., 1999; Barata et al., 2000). It has been demonstrated that bacterial hemoglobin promoted enhanced growth and germination and altered metabolite production in transgenic tobacco plants whereas the expression of functional human hemoglobin had no observable phenotypic effects (Dieryck et al., 1997). Hemoglobin therefore has the proven potential to improve seed germination, plant growth and ultimately, yield.

[0396] While tobacco plants overexpressing Vitreoscilla hemoglobin show a definite phenotypic effect (Holmberg et al., 1997), tobacco plants overexpressing soybean leghemoglobin in their chloroplasts did not significantly differ from wild-type (Barata et al, 2000). Since soybean leghemoglobin was used instead of Vilreoscilla hemoglobin in this study (Barata et al., 2000), it is unknown whether the lack of effect was due to the different binding capacity of the two hemoglobins or to chloroplast localization. Since human hemoglobin, also, did not give enhanced characteristics to tobacco when targeted to the chloroplasts (Dieryck et al., 1997) it is possible that the chloroplast is not the best location in the cell for hemoglobin. In order for hemoglobin to be effective in the chloroplast much higher concentrations would be necessary. One of the most important properties of hemoglobins is the affinity to which they bind oxygen. The bacterial hemoglobin has an affinity for oxygen that is over 100 times lower than that of soybean leghemoglobin. Therefore, it is possible that the binding affinity for oxygen is one of the major factors affecting the efficacy of hemoglobin in transgenic plants.

[0397] There are several theories on the function of hemoglobin in plants and several hypotheses on how hemoglobin might be used in a transgenic approach to improve plant metabolism. Since plant hemoglobins have a wide range of oxygen affinity, it is probable that they serve a number of different functions in plants. Hemoglobin may bind oxygen and prevent oxidative damage to the chloroplasts or other cellular compartments. Hemoglobin may also act as an oxygen sensor or as an oxygen carrier possibly to transport oxygen to the mitochondria. Recent results suggest that hemoglobin may function in the cytoplasm under conditions when the energy needs of the plant exceed the oxygen supply to somehow recycle reductant and keep glycolysis performing at maximum efficiency (Sowa et al., 1998; Duff et al., 1997). This would imply that hemoglobins would function at levels of oxygen below the affinity of the mitochondria for oxygen and would imply a low K_{D} for oxygen. This is believed to be the case for the nonsymbiotic hemoglobins. Another theory suggests that hemoglobin may function to prevent oxidative damage in the chloroplasts (Barata et al, 2000).

[0398] It is quite likely that due to the immense differences in oxygen affinity between barley and Vitreoscilla hemoglobin that their mode of action may be different and that recombinant (foreign) hemoglobin may act differently than the endogenous form. For example, the exogenous recombinant hemoglobin may increase oxygen available for respiration while the endogenous native hemoglobins may have a more specialized function. The localization of hemoglobin is also important in determining cellular function

[0399] Several different hemoglobins with different oxygen affinities are targeted to the chloroplast, mitochondria and cytosol of maize plants. The rice actin promoter is used to constitutively direct hemoglobin expression, but, seed, root and flooding inducible promoters are also used to specifically target hemoglobin to the tissue or enviromental stress conditions where it might be most effective.

[0400] It is expected that expression of plant hemoglobins will enhanced growth and seed germination.

[0401] Nucleic acid and polypeptide sequences for use in generation of transgenic crop plants having improved properties as described in the above strategy are provided in Table 1.

[0402] 34. Polycomb Proteins for Apomixis

[0403] Controlled apomixis, the asexual reproduction of a plant through the seed, would greatly reduce production costs by allowing the “fixation” of heterosis. Mutations in A. thaliana have identified a set of genes that appear to repress embryo and endosperm development in the absence of fertilization (Pruess, 1999). Alteration of the activity of related genes in corn may lead to the induction of apomixis or also changes in grain quality by alteration of the ratio of the embryo to the endosperm.

[0404] Three genes have been identified in A. thaliana which allow partial embryo or endosperm development without fertilization: FIE1, FIS2 and Medea (fis1, f644 and emb173). FIE is 40% identical to polycomb group genes that encode a WD domain, including extra sex combs (esc) from Drosophila and embryonic ectoderm development (Eed) from mammals (Ohad et al., 1999). MEDEA contains a SET domain with 55% identity to another member of the polycomb group, enhancer of zeste (Ez)) (Grossniklaus et al. 1998). FIS2 encodes a protein predicted to contain a zinc finger and nuclear localization signal, suggesting that it is involved in transcriptional control (Luo et al. 1999). In vitro and in vivo binding assays indicate that the Drosophila esc and Ez proteins interact. Thus, the products of the Arabidopsis FIE and MEDEA genes are predicted to interact directly and to perform a similar role (Preuss, 1999).

[0405] FIE1, fertilization independent endosperm, is an Arabidopsis homolog of the WD motif-containing Polycomb proteins from Drosophila and mammals (Ohad et al., 1999). These proteins function as repressors of homeotic genes. A female gametophyte with a loss-of-function allele of FIE1 undergoes replication of the central cell nucleus and initiates endosperm development without fertilization. When fertilization is prevented in Arabidopsis plants heterozygous for the FIE1 mutant allele, siliques elongate and contain seedlike structures composed of an endosperm surrounded by a seed coat. However, no embryo development is observed (Ohad et al., 1996). FIE1 may act to suppress transcription of genes for central cell nuclear replication in the female gametophyte until fertilization occurs.

[0406] The FIS1 gene is similar to a gene designated MEDEA, a recently described Arabidposis gene related to the Polycomb-group gene Ez from Drosophila (Grossniklaus, 1998). Comparison of the sequences between FIS1 and MEDEA indicates that whereas all of the characteristic domains of Ez-related proteins are eliminated by the N-terminal stop codon in the FIS1 allele, all domains except the SET domain remain intact in the C-terminal disruption of the MEDEA mutant allele. The FIS1, F664 and EMB173 mutations all result in a similar phenotype—excessive proliferation of the endosperm and an early defect in embryo development. In contrast, MEDEA mutations appear to have the opposite effect, resulting in excessive proliferation of the embryo (Grossniklaus et al. 1998). However, this may be a gain-of-function phenotype because it is found only with alleles that eliminate the C-terminal SET domain. Early stop codons in the MEDEA coding sequence (FIS1, F644, and EMB173) instead cause the same phenotype as FIE or FIS2, with excessive endosperm proliferation, even in the absence of fertilization (Kiyosue et al. 1999; Luo et al. 1999). MEDEA is an imprinted gene that displays parent-of-origin-dependent monoallelic expression specifically in the endosperm which suggests that the embryo abortion observed in mutant seeds is due, at least in part, to a defect in endosperm function (Kinoshita et al., 1999).

[0407] In the FIS1, FIS2, and FIS3 (FIE) mutants of Arabidopsis, the phase 1 ovule proceeds without pollination to phases analogous to phases 2 and 3 of wild type seed development. The seed-like structures have free nuclear endosperm and an embryo (FIS1 and FIS2), free nuclear endosperm without an embryo (FIS1, FIS2, and FIS3), or seed-like structures with cellularized endosperm (FIS1 and FIS2). Even with pollination, the FIS seed develops only to an embryo-arrested heart/torpedo stage and does not become a mature seed with a U-shaped embryo. The conversion of embryo-arrested seed to mature seed may be blocked by gene Z that is not inactivated by pollination. Mutations in the hypothetical Y gene would convert the FIS seeds into embryo-arrested seeds without pollination, and additional mutation of the Z gene would give rise to normal seeds.

[0408] The predicted polypeptide sequence of FIS2 shows a putative C2H2 zinc-finger motif within the first 35 residues of the protein and 3 putative bipartite nuclear localization signals distributed between residues 267-540 (Lou et al., 1999). Like other zinc finger proteins, FIS2 has a high serine content (12.9%). The A and B repeats produce a distinctive signature when the FIS2 protein product is compared with itself by dot matrix analysis. The consensus sequences for A and B repeats are H-V-N-D-D-N-V-S-S-P-P-[R/K]-A-H-S-S-K-K and L-T-T-T-Q-P-A-I-A-E-S-S-E-P-K-V. Following the consensus sequence described above, half of the A repeats have a T-S-D-I sequence and the other half have N-E-S-T. T he central part of the A repeat has a consensus SPP[R/K] with similarity to the motif [T/S]PXX (X is usually a basic amino acid) that has been shown to bind in the minor groove of DNA.

[0409] FIS2 expression was not detected in Arabidopsis shoots, leaves, bolting stem, flower buds or siliques after Northern blot analysis using 20 μg of total RNA for each tissue sample. Similarly, RNAse protection assays did not generate a protected fragment, suggesting that FIS2 is expressed at low levels. The only confirmed expression of the gene is in late silique RNA where a FIS2 cDNA was isolated from the library at a frequency of 1:1 00,000.

[0410] Ovule development in mutant ovules from a FIS2/fis2 heterozygous Arabidopsis plant without pollination is equivalent to the development of pi/pi ovules 3 days after pollination, and cellularized endosperm cells occasionally are accompanied by an embryo-like structure at the micropylar end (Lou et al., 1999).

[0411] Polycomb group proteins form a complex that regulates gene expression through epigenetic silencing (Pirrotta, 1998). Their roles are best understood in Drosophila. After early patterns of homeotic gene expression are established, the polycomb proteins contribute to the maintenance of those patterns by silencing homeotic genes in appropriate regions. A complex of polycomb proteins interacts with DNA sequences (polycomb response elements, or PREs) that are scattered throughout the genome (Pirrotta, 1998). These interactions can silence the expression of genes that contain PREs as well as the expression of nearby genes. It is unclear if polycomb proteins directly interact with promoters and enhancers or if instead they remodel chromatin into less accessible forms. In any case, the absence of methylation in the Drosophila genome indicates that polycomb-mediated gene silencing, at least in flies, acts through methylation-independent mechanisms (Pruess et al., 1999).

[0412] At least six polycomb proteins are known in A. thaliana. Aside from MEDEA and FIE only one other polycomb protein has an associated function in A. thaliana. The CURLY LEAF gene of Arabidopsis is necessary for stable repression of a floral homeotic gene and encodes a protein with homology to the product of the polycomb-group gene Enhancer of zeste (Goodrich et al., 1997).

[0413] Overexpression of full length polycomb proteins or potentially dominant negative derivatives of them is expected to alter corn development and potentially lead to the development of apomixis or grain of altered composition due to alterations in embryo and endosperm size. Loss of function mutants can be expected to lead to similar results.

[0414] Nucleic acid and polypeptide sequences for use in generation of transgenic crop plants having improved properties as described in the above strategy are provided in Table 1.

[0415] 35. Retinoblastoma (Rb) Like Genes

[0416] The retinoblastoma gene was one of the first tumor suppressor genes to be identified in mammals. The Rb tumor suppressor gene functions as a negative regulator of cell proliferation and normally acts to inhibit unregulated cell division in mammalian cells. Unlike mammalian cells, little is known how plants regulate G1 progression (Ach et al 1997). Several cDNA sequences were isolated from maize that encode Rb-related proteins and have been shown to be highly expressed in the shoot apex (Ach et al. 1997). The Rb-like proteins have been shown to interact with type D-Cyclins (Ach et al. 1997), a family of proteins that regulate the activity of cyclin dependent kinases (CDK) (Riou-Khamlichi et al. 1999) and control progression through the cell cycle (Cooper, 1995). It is suggested that G1 regulation in plant cells is controlled by mechanisms similar to the ones found in mammalian cells (Ach et al. 1997). The presence of CDKs and cyclins suggest that the mechanism for regulation has been conserved in eukaryotic evolution (Ach et al. 1997). Recent evidence suggests that G1 control involves the Rb-related proteins. Rb has also been shown to interact with other proteins such as the wheat dwarf virus (WDV) C1 gene (Xie et al. 1995). This protein contains the Rb binding motif LeuXCysXGlu that permits oncoproteins to inactivate Rb (Xie et al. 1995). Expression of WDV could serve as an additional way to inactivate the Rb gene either constitutively (rice actin) or at specific times or regions, e.g., seed specific expression using the GS1-2 (pedicel specific glutamine synthase-1) or bet1 (basal transfer layer specific) promoters. Anti-sense expression of the Rb-related proteins constituitively or at specific times or in specific tissues may allow for increased cell division rates, resulting in bigger plants, higher yields, increased turgor and a higher degree of seed set in times of water stress.

[0417] Nucleic acid and polypeptide sequences for use in generation of transgenic crop plants having improved properties as described in the above strategy are provided in Table 1.

[0418] 36. Root Mass

[0419] Water availability is a key factor in determining plant yield. Water flux throughout the plant is primarily controlled by influx to the root, transport, photosynthetic rate and transpiration. Roots are usually the site of the highest resistance for the movement of water through the soil-plant-atmosphere flow (Kramer and Boyer, 1995). It is believed that alteration of root mass will positively influence maize growth and yield under water limiting conditions.

[0420] A number of studies have associated root mass and yield, or root mass and drought tolerance. Replicated, controlled field trials of corn in which three week old seminal roots were severed showed a 9 percent loss in grain yield (Kisselbach, 1949). This study indicated that early seminal root formation, not a significant part of the total root system, could have a significant affect on final yield. In addition, the size and structure of the sorghum root system has been shown to be associated with drought tolerant lines. The root mass of a stress tolerant sorghum line was not affected by water stress whereas a 30% reduction in root mass was detected in a water stress sensitive line (Cruz, et al., 1992). In soybean, Hudak (1995) showed in replicated trials that a drought tolerant variety had increased root mass, root volume, and relative surface area as compared to another commonly grown similar cultivar. All these studies associate, but do not directly demonstrate, increased root mass as a factor contributing to increased yield or drought stress resistance.

[0421] One method to alter the root mass and the root influx of water is through the regulation of aquaporin proteins. Aquaporins are highly selective water channel proteins that have an important role in water transport across cell membranes and have been identified in both animal and plant cells. They are characterized as Membrane Intrinsic Proteins (MIPs) and span the membrane six times (Preston, 1992). The transmembrane domains form a narrow pore that is thought to exclude everything but water (Steudle and Henzler, 1995). The plant MIPs are proposed to accelerate the influx of water into cells to maintain turgor pressure under low water conditions (Hollenback and Dietz, 1995). Classes of these proteins have been identified in Arabidopsis which are localized to the plasmalemma (PIP) (Kaldenhoff et al 1995) or to the vacuole (TIP). The function of plant PIPs and TIPs has been demonstrated as water channel proteins by expression of these mRNAs in Xenopus oocytes (Maurel et al., 1993).

[0422] To determine effects of altered aquaporins on plant morphology, Kaldenhoff et al.(1998), produced transgenic Arabidopsis plants expressing an antisense construct of PIP1b driven by the 35S promoter. The results indicated that the expression of both the PIP1a and PIP1b genes were reduced; leaf protoplasts had reduced water permeability and swelling rates in hypotonic solution. Overall water uptake of the antisense plants was not affected. The root mass to leaf ratio was increased five fold in the antisense plants. The root xylem pressure was the same as in control plants, even after osmotic change. These data suggest that the plant compensated for a reduction in the PIP1a aquaporin by increasing root surface thereby maintaining a normal level of water transport and xylem pressure.

[0423] Antisense expression of PIPb is expected to result in an increase in the fresh weight mass ratio of root to shoot. R1 transgenic and sibling nontransgenic control plants are grown under well watered and water limited conditions. The fresh weight of root mass and aerial parts is measured in seedlings from early and mid vegetative growth plants. In addition, the stomatal transpiration rate and turgor pressure of the leaves of transgenic and control plants are measured. Larger root mass phenotype is observed and turgor is measured at flowering stage under water stress and non-stressed conditions. In addition, a yield trial is performed.

[0424] cDNAs that are expressed in maize line B73 root tissue, but not in kernel tissue, were isolated by differential Southern hybridization. The root positive/kernel negative cDNAs were further analyzed by Southern and Northern analysis. One cDNA, designated RS 81cDNA, has 88% amino acid homology to maize aquaporin TIPs (GenBank accession AF057183), and high homology to other plant TIPs. The RS81 gene sequence encodes a protein of 249 amino acid residues and a predicted molecular weight of 24,895.9 Daltons. The protein possesses 131 hydrophobic residues and a plot of the hydrophobicity pattern predicts that RS81 has 6 hydrophobic domains, in keeping with its role as a transmembrane protein that spans the membrane six times.

[0425] The rs81 cDNA was fully sequenced and used to search GenBank. The rs81 cDNA sequence encodes a protein with 88% amino acid homology to maize aquaporin TIPS (GenBank Accession AF057183). The CDNA sequences have 81% identity to a Orysa saliva root EST (dbj(D23748), 68% nucleotide identity to a Hordeum vulgare mRNA encoding a gamma-TIP-like protein (emb(X80266) and 72% amino acid identity to a Nicotiana tabacum root specific tonoplast protein ( sp(P30571).

[0426] A second root specific cDNA that has high homology to plant PIPs was isolated and was designated RS288,. This gene is also expressed in root tissue as detected by northern blots. RS288 has 84% homology to Oryza sativa aquaporin PIP2a (GenBank accession AF062393), 82% homology to Arabidopsis PIP2a (GenBank accession X75883) and 84% homology to Arabidopsis PIP2b (GenBank accession X75884) and 82% homology to a Glycine max drought induced water channel protein (GenBank accession UZ7347). The RS288 gene sequence encodes a protein of 288 amino acid residues and a predicted molecular weight of 30,346.19 Da. The protein posseses 133 hydrophobic residues and a plot of the hydrophobicity pattern predicts that RS288 has 6 hydrophobic domains, in keeping with its role as a transmembrane protein that spans the membrane six times.

[0427] It is expected that alteration of expression of aquaporin or aquaporin-like proteins in a plant will lead to increased root mass and therefore an increased efficiency of water utilization.

[0428] A transcription factor, designated G9, causes phenotypic changes in Arabidopsis when overexpressed, e.g., more gorwth in roots grown on Murashige and Skoog (1962, hereinafter called MS) medium and hairy roots on medium containing methyl jasmonate. G9/RAV2/RAP2.8 (Okamuro et al., 1997) (Kagaya et al., 1999) belongs to a small subgroup within the AP2/EREBP family of transcription factors, whose distinguishing characteristic is that its members contain a second DNA-binding domain, in addition to the conserved AP2 domain, that is related to the B3 domain of VP1/ABI3 (Kagaya et al., 1999). It has been shown that the two DNA-binding domains of RAV1 (another member of this subgroup of proteins) can separately recognize each of two motifs that constitute a bipartite binding sequence and together cooperatively enhance its DNA-binding affinity and specificity (Kagaya et al., 1999). The similarity between G9 and all other AP2/EREBP proteins, from Arabidopsis and from other plant species, does not appear to be significant outside of the conserved AP2 and B3 domains. G9 appears to be constitutively expressed in Arabidopsis. However, overexpression of G9 causes phenotypic changes in the roots, i.e., more growth in roots grown on MS medium, and hairy roots on media containing methyl jasmonate. It is expected that overexpression of G9 in a plant will cause phenotypic changes in roots and enhance the water use efficiency of the plant.

[0429] Nucleic acid and polypeptide sequences for use in generation of transgenic crop plants having improved properties as described in the above strategy are provided in Table 1.

[0430] 37. Short Vegetative Phase

[0431] In maize, a major quantitative trait locus (QTL) affecting early flowering, namely vegetative to generative transitional 1 (Vgt1), also called Maturity factor 1 (Mf1), has been mapped at about 5 cM (between UMC89a and EC2-11, PG7) in bin 8.05 of chromosome 8L. This QTL originated from Gaspe Flint and in a homozygous state enables corn plants to flower 7-10 days earlier than normal plants. The QTL exhibits a partial dominant effect in heterozygotes. It was believed that the early flowering of Vgt1 plants is due to the very early timing of tassel initiation rather a fast rate of growth, and Vgt1 may act in pathway to repress the transition from vegetative to floral development.

[0432] A repressor of the floral transition, named Short Vegetative Phase (SVP) was recently cloned from Arabidopsis (Hartmann, et al. 2000). It represents a new member of the MADS-box gene family of transcription factors. Homozygous SVP mutant plants flower significantly earlier than wildtype plants and a partial dominant effect is observed in heterozygotes. It is believed that SVP functions as a repressor of flower initiation. Based on similarity in function and flowering phenotype, it is believed that the orthologue of SVP in corn is Vgt1.

[0433] As Vgt1 corn plants flower 7-10 days earlier than normal corn plants, the identification of the Vgt1 gene in corn provides several potential applications, such as: transforming Gaspe Flint Vgt1 gene(s) into elite corn lines to produce early flowering elite corn; introgressing Gaspe flint Vgt1 gene(s) into elite corn lines by backcrossing using the molecular markers for the Vgt1 gene(s); and genetic engineering early maturity crops (corn, rice, wheat, and etc.) of high yield.

[0434] Nucleic acid and polypeptide sequences for use in generation of transgenic crop plants having improved properties as described in the above strategy are provided in Table 1.

[0435] 38. Lodging Resistance

[0436] The Arabidopsis STURDY mutant identified by T-DNA tagging displays an increased cell number phenotype in the stems of mutant plants and therefore, is more lodging resistant than wild-type. In addition STURDY seeds weigh 30% more than wild-type seeds. The STURDY gene was cloned and encodes a patatin-like protein. Transgenic studies in Arabidopsis have confirmed that the STURDY phenotype is caused by the overexpression of STURDY. It is believed that crop lodging resistance and seed weight (yield) may be improved by expressing STURDY in the stems and seeds of crop plants. Furthermore, it is expected that the increase in seed weight will change the relative oil or protein content of the seeds and result in a higher grain quality. The detailed isolation and characterization of the STURDY mutant and STURDY gene are summarized in Huang et al., 2000. Patatin-like proteins from N. tabacum have been shown to have phospholipase A2 activity (Dhondt et al., 2000).

[0437] Nucleic acid and polypeptide sequences for use in generation of transgenic crop plants having improved properties as described in the above strategy are provided in Table 1.

[0438] 39. Virus Resistance

[0439] Maize is subject to a large number of diseases caused by RNA viruses. In the United States, Maize Dwarf Mosaic Virus (MDMV) and Maize Chlorotic Dwarf Virus are major viral pathogens (MCDV). Outside of the United States, Maize Streak Virus (MSV) and Maize Rough Dwarf Virus (MRDV) are major pathogens found in Africa (MSV) and Europe, South America and Asia (MRDV). Infection with any of these viruses is associated with heavy yield reductions (McGee 1998).

[0440] Yeast contains a set of genes, dubbed superkiller genes (SKI genes), involved in the degradation of non-polyadenylated RNA (Jacobs, 1998; Benard et al., 1999; van Hoof et al., 2000; Searfoss and Wickner 2000). Mutations in these genes result in an increase in the copy number of L-A and M viruses with a resulting increase in the production of viral encoded toxins that gave the SKI mutations their name (Toh et al., 1978, Toh and Wickner, 1980). However, overexpression of at least one of these proteins, SKI7, results in a increase in the rate of degradation of non-polyadenylated viral RNA and curing of the M virus (Benard et al., 1999).

[0441] Increasing the rate of breakdown of non-polyadenylated RNA in plants may result in increased resistance to plant viruses that produce such RNA. Three of the major corn viruses MDMV (a potyvirus, ss linear RNA genome), MCDV (a waikavirus, ss linear RNA genome) and MRDV (a fijivirus, ds linear RNA genome) produce non-polyadenylated transcripts, suggesting that overexpression of genes involved in RNA breakdown may protect corn against these viral pathogens. Enhanced degradation of viral RNAs may also result in broad-spectrum resistance to plant RNA viruses.

[0442] Mutations in SKI2, SKI3, SKI4, SKT6, SKI7, and SKI8 all reduce the copy number of the double stranded RNA viruses L-A and M (Wickner, 1996). SKI2, SKI3 and SKI8 exist as a complex in vivo and are thought to be located in the nucleus (Brown et al., 2000). Of the three proteins in the complex, SKI2 is a helicase, SKI8 is a WD repeat containing protein (Matsumoto et al., 1993) and SKI3 contains 11 TRP repeats and is nuclear localized (Rhee et al., 1989), suggesting that the SKI2/SKI3/SKI8 complex is located in the nucleus. SKI6 is a 3′ to 5′ exonucleases related to RNAse P14 and can be replaced by its A. thaliana orthologue AtRrp411 (Chekanova et al., 2000). SKI7 is a GTPase belonging to the EF-Tu family. The SKI proteins are thought to be either components or regulators of the RNA degrading exosome (Mitchell and Tollervey, 2000).

[0443] Corn lines overexpressing SKI proteins or their orthologues are tested for resistance to ds RNA viruses such as Maize Rough Dwarf Virus and Mal de Rio Cuarto Virus as well as ss RNA viruses such as Maize Dwarf Mosaic Virus and Maize Chlorotic Dwarf Virus. Other types and classes of viruses are also screened. It is expected that plants overexpressing SKI genes or their orthologues will be virus resistance.

[0444] Nucleic acid and polypeptide sequences for use in generation of transgenic crop plants having improved properties as described in the above strategy are provided in Table 1.

[0445] 40. Yield Associated Genes

[0446] Genes are selected that are transcriptionally regulated in a manner that correlates with high yield. The expression of the selected genes is modified in corn by overexpression, antisense or sense supression, tissue specific expression or development stage specific expression.

[0447] The 40S Ribosomal protein S4 (LIB3245-104-P1-N1-D11) is an RNA-binding ribosomal protein that plays a role in translational fidelity (Vincent and Liebman, 1992; Synetos et al., 1996; Dahlgren et al., 2000). Elevated levels of S4 RNA levels are associated with growth in tobacco mesophyll protoplasts (Marty et al., 1993) and in benign prostatic hyperplasia (Vaarala et al., 2000). Little information is available on the effects of S4 overexpression.

[0448] Chloroplastic fructose-1,6-bisphosphatase (LIB3245-466-P2-K1-G8 plays an important role in the Benson-Calvin cycle. The enzyme is regulated by thioredoxin in response to the redox potential of the chloroplast (Hirasawa et al., 1999) and may be a key factor in determining sensitivity to chilling induced photooxidative damage (Hutchison et al., 2000). Little information is available on the effects of altering expression of the chloroplastic form of this enzyme.

[0449] TBP-1 (TAT binding protein 1 or subunit 4 of 26S proteasome; is a AAA ATPase that forms part of the 19 S regulatory complex (RC) of the 26 S proteasome. Human and plant versions of TBP-1 have been shown to complement yeast TBP1 mutants (Schnall et al., 1994; Fu et al., 1999).

[0450] UBC2-1 is very similar to AtUBC2-1 (also called ubiquitin-conjugating enzyme 15) (Bartling et al., 1993) and has protein sequence motifs in common with ubiquitin conjugating enzymes as determined using PFAM. Ubiquitin-conjugating enzymes act in conjunction with E1 (ubiquitin-activators) and E3 (the ubiquitin-protein ligases) proteins to target proteins for degradation. Components of the ubiquitination system have been shown to directly interact with the 19 S regulatory complex of the 26 S proteasome (Tongaonkar et al., 1999; Xie and Varshavsky, 2000). A yeast ubiquitin-conjugating enzyme, UBC8, has also been shown to be responsible for turnover of fructose-1,6-bisphosphate phosphatase in response to a shift to glucose-containing media (Schule et al., 2000). However, ubiquitin is not found in the chloroplast of higher plants (Beers et al., 1992) and the significance of this is unknown.

[0451] RRP5 (LIB3245-141-P2-N1-C11) was identified in yeast to be an essential protein required for the production of 18S and 5.8S RNAs (Venema and Tollervey, 1996).

[0452] The CBP-like gene encodes a protein that is similar to the A. thaliana protein YUP8H12R.38. This protein is in turn related to the CREB binding protein of C. elegans. It is predicted to contain two TAZ and a single ZZ type zinc fingers (Ponting et al., 1996) and a PHD domain. This suggests that encodes a transcriptional co-activator similar to CBP or p300.

[0453] Nucleic acid and polypeptide sequences for use in generation of transgenic crop plants having improved properties as described in the above strategy are provided in Table 1.

[0454] 41. Wax Biosynthesis

[0455] Epicuticular waxes on the leaf surface serve several functions, including resistance to water loss, insects and disease (McWhorter 1993). Wax production has been shown to increase in drought stressed plants (McWhorter 1993). Increased wax levels also make the plant more tolerant to high temperature stress (McWhorter 1993). Several factors condition the relation between epicuticular wax levels (EWL) and water use efficiency (Premachandra et al. 1994). First, the chemical composition and physical structure of waxes may influence the permeability of the cuticle and epicuticle to water. Second, the occlusion of stomatal pores by wax and presence of wax inside the stomatal antechamber may modify conductance and transpiration. Third, the cuticle of guard cells may be more highly permeable than other epidermal cells and wax deposition may reduce permeability. Finally, leaf reflectance in the visible and near-infared wavelengths may affect the balance between water vapor efflux and CO2 assimilation.

[0456] The overexpression of a gene encoding a protein involved in wax biosynthesis using a strong promoter may increase the water use efficiency of a plant, making it less susceptible to drought. Several genes involved with wax production have been reported: G11 (GenBank Accession U37428), G12 (GenBank Accession X88778), G18 (GenBank Accession U89509), G115 (GenBank Accession AF001012), Cer1 (GenBank Accession AF143746), Cer2 (GenBank Accession U40849), Cer3 (GenBank Accession X95962) and Cut1 (GenBank Accession AF129511).

[0457] Expression of the glossy loci in maize affects wax biosynthesis. Mutations at the G11 locus of maize quantitatively and qualitatively affect deposition of cuticular waxes on the surface of seedlings (Hansen et al. 1997). The G12 locus is required for the formation of the epicuticular wax layer of young plants (Tacke et al. 1995). A mutation in the G18 locus reduces the level and alters the composition of seedling cuticular waxes (Xu et al. 1997). The G18 protein is thought to function as a reductase during fatty acid elongation in the cuticular wax biosynthesis pathway (Xu et al. 1997). G115 loss of function mutants have altered transition from juvenile to adult growth by conditioning the abbreviated expression of juvenile epidermal traits and the coordinate precocious expression of adult epidermal characteristics (Moose et al. 1994). G115 shows sequence homology to the Arabidopsis floral and regulatory genes APETALA2 and AINTEGUMENTA (Moose et al. 1996). These findings suggest that overexpression of these specific glossy genes may result in increased wax production on the leaf cuticle. Antisense transformation of G115 may induce the plant to begin the adult phase prematurely.

[0458] In Arabidopsis the Eceriferum (CER) genes affect different steps of the wax biosynthesis pathway (Aarts et al 1995). CER1 encodes a novel protein involved in the conversion of long chain aldehydes to alkanes, an important step in wax biosynthesis (Aarts et al. 1995). G11 and CER1 show significant sequence homology. CER2 contains sequence similarity to maize gene G12. CER3 encodes one of 21 gene products involved in wax production (Hannoufa et al 1996). This gene however shows no homology to any other known protein, yet the second exxon of CER3 has a RRX12KK nuclear localization sequence (Hannoufa et al 1996).

[0459] In Arabidopsis, suppression of CUT1 gene expression results in wax-less stems and siliques as well as male sterility (Millar et al 1999). In CUT1 suppressed plants the C24 chain-length wax components predominate, suggesting that CUT1 is necessary for elongation of C24 long-chain fatty acids (Millar et al. 1999). CUT1 does not map to any other known Eceriferum loci suggesting it is a novel wax biosynthesis gene. The fact that these genes are linked so tightly to wax biosynthesis suggests that the overexpression of these genes may result in increased wax biosynthesis.

[0460] The overexpression of wax biosynthesis genes, as well as anti-sense expression of G115 may increase water use efficiency and make the plants less susceptible to drought. Increased wax production could also lower the plants susceptibility to insect damage, disease and high temperature stress.

[0461] Increased epicuticular wax levels can be measured in several ways. First, the increased epicuticular wax can be scored visually under a dissecting scope. Second, the wax level can be measured by removing it with chloroform, allowing the chloroform to evaporate and then measuring wax remaining (McWhorter et al. 1993). The wax weights are related to the total area of leaves or leaf sections extracted (McWhorter et al. 1993). Last, the effects of increased epicuticular wax can be determined in the greenhouse or field as it relates to water use efficiency.

[0462] Mendel Biotechnology has identified an A. thaliana transcription factor (G975) that leads to increased accumulation of epicuticular wax (WO 01/36597). Overexpression of this gene and it's homologues is tested as a means of increasing wax content in maize, improving water use efficiency in the plant and increasing yield. G975 is a member of the AP2/EREBP family (EREBP subfamily) of transcription factors. G975 is expressed in flowers and, at lower levels, in shoots, leaves, and siliques. GC-FID and GC-MS analyses of leaves from G975 overexpressing plants have shown that the levels of C29, C31, and C33 alkanes are substantially increased (up to 10-fold) compared to control plants. A number of additional compounds of similar molecular weight, presumably also wax components, accumulate to significantly higher levels in G975 overexpressing plants. Although total amounts of wax in G975 overexpressing plants have not yet been measured, C29 alkanes constitute close to 50% of the wax content in wild-type plants (Millar et al., 1998), suggesting that a major increase in total wax content occurs in these transgenic plants. However, the transgenic plants have an almost normal phenotype (although small morphological differences are detected in leaf appearance), indicating that overexpression of G975 is not deleterious to the plant. It is noteworthy that overexpression of G975 does not cause the dramatic alterations in plant morphology that have been reported for Arabidopsis plants in which the FATTY ACID ELONGATION1 gene was overexpressed (Millar et al., 1998). It is believed that G975 will specifically regulate the expression of genes involved in wax metabolism. One Arabidopsis AP2 gene that is significantly more closely related to G975 than the rest of the members of the AP2/EREBP family was identified. It is believed that this gene, G1387, will have a function (and therefore a use) related to that of G975.

[0463] Nucleic acid and polypeptide sequences for use in generation of transgenic crop plants having improved properties as described in the above strategy are provided in Table 1.

[0464] 42. Alteration of Ear Development

[0465] Corn yield is ultimately a product of resources in the soil and energy from sunlight. At lower population density, individual plants perform very well, but the efficiency of resource utilization is low and some sunlight is wasted. At higher population density, soil resources and sunlight utilization is increased. As a result, the biomass produced per acre is higher at high population density. However, corn plants usually favor male flower development when growth conditions are limiting. At high population density, plants grow taller to compete for sunlight and to make sure the tassel is exposed in the open air. This growth behavior restricts ear development and limits grain yield. This invention relates to novel methods of modifying the growth behavior of corn plants by changing the expression level of a gene or genes such that ear development is promoted.

[0466] Transcript profiling experiments have shown that the gene represented by EST 700456686H1 (ZMSE001) is expressed at least 2 fold higher in normal developing ears as compared to in ears of similar size but with arrested development. A Blast search against Monsanto rice genomic sequence indicates that a homolog of this EST is located on rice BAC clone OJ990528_{—}08, which is on chromosome 1 at location 48.5 centimorgan. Several rice yield component QTLs, including 1000 grain weight and tiller number, have been found in this region of chromosome 1. Based on the above data, the gene represented by EST 700456686H1 is believed to be essential for corn ear development. Overexpression of this gene may lead to larger sink and higher yield, while suppression of expression of this gene may result in aborted ear development. A full length clone containing the ZMS001 gene, zmflb73245g08_FLI, was identified and the sequence provided herein.

[0467] Nucleic acid and polypeptide sequences for use in generation of transgenic crop plants having improved properties as described in the above strategy are provided in Table 1.

[0468] 43. Carbonic Anhydrase

[0469] Some algae have a unique carbon dioxide concentrating mechanism by which they concentrate bicarbonate in their chloroplasts and cytosol. The CO₂ concentrating mechanism involves the accumulation of bicarbonate and conversion of the accumulated bicarbonate to CO₂ near the location of ribulose bisphosphate carboxylase (RUBISCO) in the chloroplast. Bicarbonate transporters may also be involved in transporting bicarbonate between the various compartments in algal cells.

[0470] In higher plants RUBISCO, the enzyme which catalyses the carbon fixation step in photosynthesis, utilizes CO₂ rather than bicarbonate. In C₃ and C₄ plants CO₂ availability is a determining factor in the efficiency of photosynthesis. In C₄ plants such as maize and sorghum one factor in determining the quantum efficiency of photosynthesis may be CO₂ leakage from the bundle sheath cell chloroplast (Furbank 1998). It has been estimated that between 10 and 30% of the CO₂ released in the bundle sheath cells leaks back to the mesophyll cell creating an inherent deficiency in C₄ photosynthesis.

[0471] Although C₄ plants have lower rates of photorespiration than C₃ plants, RUBISCO is a relatively inefficient enzyme in C4 plants. The level of CO₂ in vivo in the vicinity of RUBISCO is estimated to be about equal to the Kₘ(CO₂) of RUBISCO or substantially lower than the saturating level of CO₂ for the Vₘₐₓ in C4 plants (Sharkey 1998). Therefore, while oxygen is readily available for C₄ plants, increases in the CO₂ level are expected to increase the velocity of carbon fixation. Increasing the level of CO₂ in the vicinity of RUBISCO is one strategy to improve the quantum efficiency of photosynthesis in maize.

[0472] Carbonic anhydrase catalyses the interconversion of CO₂ and bicarbonate and is used by many aquatic organisms to concentrate CO₂ for photosynthesis. Consequently, the overexpression of specific forms of carbonic anhydrase in specific subcellular compartments may increase the in vivo level of CO₂ in maize and therefore the activity of RUBISCO.

[0473] There are a number of forms of carbonic anhydrase that occur in nature. In higher plants carbonic anhydrases have been detected in the cytosol, chloroplast stroma, and chloroplast thylakoid membrane. The most important carbonic anhydrase for photosynthesis may be the chloroplast thylakoid carbonic anhydrase. This type of carbonic anhydrase identified in microalgae such as Chlamydomonas and Chlorella and in higher plants such as maize and pea (reviewed in Stemler, 1997). Under alkaline conditions, the Kₘ (bicarbonate) of thylakoid carbonic anhydrase is 10 mM, whereas the Km of the stromal carbonic anhydrase is 40 mM. Therefore, under alkaline conditions created during photosynthesis in the chloroplast stroma, the thylakoid carbonic anhydrase probably plays a bigger role than the stromal carbonic anhydrase in catalyzing the dehydration of bicarbonate and in the maintenance of high CO₂ concentration near RUBSICO (Ignatova et al., 1998).

[0474] No plant thylakoid carbonic anhydrase genes have been cloned to date. However, a thylakoid carbonic anhydrase has been reported in Chlamnydomonas reinhardtii that is associated exclusively with the thylakoid membrane and is localized in the thylakoid lumen (Karlsson et al., 1998). It complements the phenotype of cia-3, a mutant that lacks an internal carbonic anhydrase and requires elevated levels of CO₂ for growth. The gene, cah3, encoding this unique thylakoid-type carbonic anhydrase has been cloned (GenBank accession # 408710). Plant stromal carbonic anhydrases are of the beta type, while mammalian carbonic anhydrases are of the alpha type. Alpha carbonic anhydrases are not only kinetically better (their Kₘ is half that of the plant carbonic anhydrases), but they are also less dependent on pH for activity as compared to the beta type carbonic anhydrases.

[0475] The thylakoid carbonic anhydrase isolated from Chlamydomonas is localized in the thylakoid lumen. This has led to the proposal of a carbon dioxide concentrating mechanism that involves the thylakoid lumen. According to this mechanism, stromal bicarbonate enters the thylakoid lumen via the pH gradient across the thylakoid membrane created by photosynthetic electron transport. The accumulated bicarbonate is dehydrated to CO₂ by the thylakoid carbonic anhydrase located in the lumen. Carbon dioxide then diffuses out from the lumen into the stroma where it is fixed by RUBISCO (Raven, 1997; Park et al., 1999). Expression of the alpha-carbonic anhydrase from Chlamydomonas is expected to increase bundle sheath CO₂ levels in maize.

[0476] A second way to improve photosynthetic efficiency is to accumulate bicarbonate in the chloroplast. Cyanobacteria and microalgae accumulate bicarbonate as a means to prevent the loss of CO₂ through diffusion. Accumulation of bicarbonate in the chloroplast of C₄ plants is expected to fulfill the same objective if a means to convert the bicarbonate to CO₂ in the thylakoids is available. This may be accomplished by the endogenous carbonic anhydrase or alternatively if the level of endogenous carbonic anhydrase is not high enough, by overexpressing both carbonic anhydrase and the bicarbonate transporter.

[0477] Bicarbonate accumulation in the chloroplast may be achieved by expressing genes encoding bicarbonate transporters in the plant that facilitate the accumulation of bicarbonate in cyanobacteria and microalgae. In cyanobacteria, bicarbonate transporters are located in the plasma membrane. Therefore, to utilize them for bicarbonate accumulation in the chloroplast, it will be necessary to target them to the chloroplast membrane. Two bicarbonate transporters have been cloned from Synechococcus. A high affinity Na⁺ dependent bicarbonate transporter has been shown to be encoded by the cmpABCD gene cluster (Omata et al., 1999, GenBank Accession numbers D26358 and M32999). The expression of this operon is induced under low CO₂ conditions. Bicarbonate transport activity of this transporter has been demonstrated and confirmed in Synechococcus (Omata et al, 1999). A second putative bicarbonate transporter, IctB, has been cloned from Synechococcus (Bonfil et al., 1998). This gene was identified and cloned from high CO₂ requiring mutants of Synechococcus that are impaired in bicarbonate transport (GenBank Accession number U62616).

[0478] Targeting of carbonic anhydrases and bicarbonate transporters to subcellular locations is desirable. For stromal localization, the RUBISCO small subunit transit peptide (RbcS TP) will be used, whereas for lumenal localization, the psbQ transit peptide (psbQ TP; Gaur et al, 1999) will be used. The Chlamydomonas thylakoid localized carbonic anhydrase has a targeting sequence and therefore, it will not be necessary to operably link a transit peptide to this gene. Similarly, the bicarbonate transporter from Chlamydomonas (LIP-36G1) has a targeting sequence. It will be desirable to include a transit peptide with the microbial (Anabaena) carbonic anhydrase to target it to the chloroplast lumen. It is proposed to target the bicarbonate transporter from Synechocystis (IctB) to both the chloroplast lumen and the chloroplast stroma since it is uncertain where it may provide the most benefit.

[0479] Improvements in photosynthesis may be achieved by utilizing either a thylakoid carbonic anhydrase or a bicarbonate transporter, each overexpressed independently. Alternatively, the two strategies may be combined and the two components could be expressed simultaneously in the same plant. This strategy will be the most useful in preventing CO₂ diffusion from the cytoplasm and in supplying CO₂ to RUBISCO. The bicarbonate transporter will allow accumulation of bicarbonate in the chloroplast. The accumulated bicarbonate is then converted to CO₂ by the thylakoid carbonic anhydrase, thus mimicking the CO₂ concentrating mechanism utilized by cyanobacteria and microalgae. Plants overexpressing the carbonic anhydrase will be crossed with plants overexpressing the transporters to produce plants overexpressing both genes simultaneously. Alternatively, both carbonic anhydrase and bicarbonate transporter genes may be introduced simulataneously into the plant using transformation methods known in the art.

[0480] Nucleic acid and polypeptide sequences for use in generation of transgenic crop plants having improved properties as described in the above strategy are provided in Table 1.

[0481] 44. F-Box Proteins

[0482] F-box containing proteins have been shown to play important roles in plant development, including floral development, circadian clock, response of the plant growth regulators auxin and jasmonic acid (del Pozo and Estelle, 2000) and responses to environmental stresses. Proteins containing this conserved 40-50 amino acid domain are thought to act as adapters that link target proteins to ubiquitin ligase complexes called SCFs (named after their main components, Skp I, Cullin, and an F-box protein). Different F-box containing proteins have been found to associate with SCF and this interaction appears to mediate the specificity of the complexes' ubiquitin ligase activity (Craig and Tyers, 1999). Overexpression of F-box containing proteins has been shown to produce a number of potentially useful phenotypes in plants and other organisms, suggesting that members of this protein family represent a source of genes that may be used to alter or enhance plant performance and potentially increase plant yield or disease resistances when overexpressed. A number of plant F-box protein genes with functional associations are shown below.

F-Box Protein Genes

| Gene | Phenotype | Organism | Reference |
|---|---|---|---|
| VirF | Decreased virulence in | A. tumefaciens | Schrammeijer et al., |
| | mutant | | 2001 |
| FKF1 | Late flowering, clock | A. thaliana | Nelson et al., 2000 |
| | decoupling in mutant | | |
| Zeitlupe/LKP1 | Late flowering, clock | A. thaliana | Somers et al., 2000; |
| | decoupling in mutant | | Kiyosue and Wada, |
| | | | 2000 |
| UFO/Fimbriata/ | Meristem identity | A. thaliana/A. | Samach et al., 1999; |
| Stamina pistilloida | | majus/P. sativum | Wilkinson et al., 2000; |
| | | | Taylor et al., 2001 |
| TIR1 | Reduced auxin response | A. thaliana | Gray et al., 1999; |
| | in mutant | | Ruegger et al., 1998 |
| COI1 | Mutants fail to respond | A. thaliana | Xie et al., 1998 |
| | to jasmonate | | |

[0483] Constitutive overexpression of plant F-box containing genes has been reported to produce a number of phenotypes, suggesting that members of this gene family may provide a source of genes capable of modifying plant growth and development. For example, overexpression of either Zeitlupe/LKP1 or FKF1 with a constitutive promoter is reported to produce plants with elongated hypocotyls and petioles and a late flowering phenotype under long days (Nelson et al., 2000; Kiyosue and Wada, 2000). Overexpression of UFO has been reported to induce ectopic expression of AP3 and alterations in floral architecture (Lee et al., 1997). Overexpression of TIR1 has been reported to produce effects similar to those seen when auxin levels are raised, i.e., growth of the primary root was inhibited, root tips became agravitropic, lateral root development was promoted and increased proliferation of root hairs was seen at the primary root tip (Gray et al., 1999).

[0484] SCFs function as ubiquitin-ligase complexes and have been shown to trigger the degradation of a wide range of proteins. The F-box is a protein motif of approximately 50 amino acids that functions as a site of protein-protein interaction. The F-box motif links the F-box protein to other components of the SCF complex by binding to the core SCF component Skp I (Schulman et al., 2000).

[0485] F-box proteins have more recently been discovered to function in non-SCF protein complexes in a variety of cellular functions. There are 11 F-box proteins in budding yeast, 326 predicted in Caenorhabditis elegans, 22 in Drosophila, and at least 38 in humans. F-box proteins often include additional carboxy-terminal motifs capable of protein-protein interaction; the most common secondary motifs in yeast and human F-box proteins are WD repeats and leucine-rich repeats, both of which have been found to bind phosphorylated substrates to the SCF complex. The majority of F-box proteins have other associated motifs, and the functions of most of these proteins have not yet been defined. Arabidopsis has some 250 proteins that are predicted to contain F-box motifs. To date functions have been assigned to only five of these proteins.

[0486] Several criteria may be used to select genes to express in transgenic plants. Monocot homologues of the Arabidopsis F-box proteins associated with phenotypes (Zeitlulpe, FKF1, UFO, TIR1 and COI1) are selected. Corn and soy genes with F-box domains are selected. Proteins where F-box domains are found in conjunction with other functional domains (tubby, WD repeat) are selected for expression in plants.

[0487] Tubby domains are predicted to be DNA binding domains (Boggon et al., 1999) and have been identified in the mouse tubby gene and the human retinitis pigmentosa gene. Several clones of monocot genes encoding tubby-like transcription factors with and without F-box domains have been identified. Two of the maize clones appear to be full length. One clone, fC-zmro700093745, encodes a protein with an F-box followed by two tubby domains and the second clone, fC-zmle700440044a, encodes a protein predicted to have two tubby domains.

[0488] Nucleic acid and polypeptide sequences for use in generation of transgenic crop plants having improved properties as described in the above strategy are provided in Table 1.

[0489] 45. HMG CoA Synthase

[0490] Mevalonic acid is the precursor of many isoprenoid derivatives, such as sterols, ubiquinones, growth regulators, brassinosteroids and terpenes that are necessary for normal growth, development and defense against pathogens. 3-hydroxy-3-methylglutaryl-coenzyme A synthase (HMGS), an enzyme in the mevalonate biosynthetic pathway, converts acetyl CoA and acetoacetyl CoA to HMGCoA. While there are many studies on the next enzyme in the pathway, HMG CoA reductase, HMGS is less characterized in plants.

[0491] In Brassica juncea, a multigene family encodes HMGS. HMGS1 is expressed in all plant parts and exhibits developmental regulation in flower, seed and seedling with highest expression during early development. ABA, mannitol and dehydration down-regulate HMGS expression in Brassica juncea and arrest seedling growth. Methyl jasmonate, salicylic acid and wounding induced HMGS expression suggesting its role in defense response. The B. juncea HMGS is related to HMGS from Arabidopsis thaliana, Pinus sylvestris, Homo sapiens, Blatella germanica and Schizosaccharomyces pombe. Characterisation and regulation of the HMGS gene in cereals such as maize, rice and wheat may elucidate the various components of the pathway in cereals.

[0492] Overexpression of HMGS may lead to increased accumulation of specific defense metabolites that could improve defense response (both abiotic and biotic) in maize, rice or wheat.

[0493] HMG CoA synthase has also been isolated from yeast. Yeast and soy fC-gmst700790793 are tested for their ability to improve corn performance by increasing disease resistance, or improving growth characteristics of the plant.

[0494] Nucleic acid and polypeptide sequences for use in generation of transgenic crop plants having improved properties as described in the above strategy are provided in Table 1.

[0495] 46. Oxidative Stress

[0496] Over the course of a growing season a plant may be exposed to extremes of cold, heat and light (Shaw, 1988). Each of these stresses leads to the production of free radicals and can damage the plant to the extent that overall performance and grain yield are reduced. By protecting plants from the damaging effects of oxidative stress it will be possible to maintain the plant in a highly productive state and increase average grain yields.

[0497] Much of the damage associated with oxidative stress appears to be associated with the chloroplast. Cold temperatures, high light intensity and drought stress can all lead to the build up of excess reducing equivalents within photosynthetic reaction centers and the generation of singlet oxygen by photosystem I, photosystem II (Bowyer and Leegood, 1997) and possibly the Rieske Fe—S protein of the cytochrome b6/f complex. The highly reactive and short lived singlet oxygen is believed to inactivate photosystem II D1 protein and reduce oxygen to produce superoxide.

[0498] Experiments in which the ratio of electron transport to CO₂ assimilation has been measured have been used to provide support for the above model in corn and sorghum. In maize leaves at normal growth temperatures, the relationship between photosynthetic electron transport and CO₂ assimilation is highly conserved over a wide range of light intensities and CO₂ concentrations (Genty et al., 1989). The majority of the reductants generated by electron transport are consumed by CO₂ assimilation and the effect of other sinks, such as nitrogen metabolism, O₂ reduction via photorespiration, and the Mehler reaction, are minimal (Edwards and Baker, 1993). However, when maize leaves are grown at low temperatures the ratio of electron transport to CO₂ assimilation increases (Fryer et al., 1995, 1998; Massacci et al., 1995). A similar increase in the ratio of electron transport to CO₂ assimilation was also observed when sorghum leaves were drought stressed (Massacci et al., 1996). Therefore, electron sinks, other than CO₂ and O₂, may develop during periods of environmental stresses, thereby imposing restrictions on photosynthetic carbon metabolism.

[0499] Plants have developed an system of defenses to cope with the toxic compounds and damage associated with oxidative stress. Superoxide dismutase is the primary mechanism of defense against superoxide generated from singlet oxygen. This enzyme converts superoxide into hydrogen peroxide. Copper/Zinc (Cu/Zn) and iron (Fe) containing superoxide dismutases are found in the chloroplast stroma (Jackson et al., 1978). Overexpression of Fe superoxide dismutase (Van Camp, 1997; Thomas et al., 1999; Van Breusegem et al., 1999; McKersie et al., 2000) and copper/zinc (Gupta et al., 1993) has been reported to protect a wide range of plants from a variety of stresses. Both Fe and Cu/Zn SODs are found in the chloroplast stroma and appear to protect the plant from superoxide in stroma. There have also been reports of Fe SOD being more intimately associated with photosystem II (Navari-Izzo et al., 1999). Manganese (Nm) SOD is thought to be located in the mitochondria of higher plants (Kliebenstein et al., 1998). However, Mn SOD is associated with the thylakoids in cyanobacteria and appears to provide protection against singlet oxygen generated in the thylakoids (Thomas et al., 1998). Overexpression of Mn SOD in higher plants has been reported to protect plants from oxidative stress (Bowler et al., 1991; Zhu and Scandalios, 1992; McKersie et al., 1999). Germin has recently been identified as an extracellular MnSOD (Carter and Thronburg, 2000; Woo et al., 2000).

[0500] Carotenoids have also been suggested to play a primary role in the protection of photosynthetic organisms against oxidative stress. They are able to quench ³Chl and ¹O₂ and these functions were demonstrated in vitro in PSII complexes (Telfer et al., 1994). Under excess light, there is a rapid change in the carotenoid composition of the light harvesting complexes. The diepoxide xanthophyll violaxanthin (V) is rapidly and reversibly converted via the intermediate antheraxanthin (A) to the epoxide-free zeaxanthin (Z) under the action of the enzyme V deepoxidase (Bugos et al, 1998). Zeaxanthin appears to protect Arabidopsis thylakoid membranes from lipid peroxidation. However, it is not clear if this effect involves direct quenching of singlet oxygen or another mechanism (Havaux and Niyogi; 1999). Increases in antheraxanthan and zeaxanthin have been seen in drought stressed wheat (Loggini et al, 1999) and it is expected that increasing the zeaxanthin content of thylakoid membranes may protect plants from oxidative stress.

[0501] Hydrogen peroxide generated by superoxide dismutase is toxic to the chloroplast and must be rapidly removed. This is achieved by the activity of ascorbate-glutathione cycle peroxidase which reduces hydrogen peroxide to water and oxidizes ascorbate to form monodehydroascorbate radicals. Monodehydroascorbate radicals are then reduced to ascorbate by one of three different pathways in the chloroplast: 1) reduction by monodehydroascorbate reductase with the concomitant oxidation of NADPH; 2) reduction by ferredoxin; or 3) spontaneous disproportionation to form ascorbate and dehydroascorbate. Dehydroascorbate produced by disproportionation is reduced to ascorbate by reduced glutathione in a reaction catalyzed by dehydroascorbate reductase. Finally reduced glutathione is regenerated by glutathione reductase.

[0502] The specializations associated with C4 metabolism in corn pose some unique restraints on the ascorbate-glutathione cycle. A model for the maize ascorbate-glutathione cycle was proposed by Kingston-Smith and Foyer (2000). A key observation that this model attempts to explain is the heightened sensitivity of bundle sheath cells to oxidative damage as compared to mesophyll cells. Bundle sheath cells are deficient in photosystem II and the reducing equivalents generated by it. Photosystem I (PSI), reducing molecular oxygen to superoxide (O), is equally distributed between the mesophyll and bundle sheath cells. The superoxide dismutase (SOD) and ascorbate peroxidase (APX) are predominantly located in the bundle sheath cells. Reduced ascorbate (AA) is -oxidized by the action of APX to monodehydroascorbate (MDHA) which is regenerated either by disproportionation to AA and dehydroascorbate (DHA) or by the routes of enzymatic and non-enzymatic reduction available in the bundle sheath cells (Doulis et al., 1997). DHA and oxidized glutathione (GSSG) cannot be reduced in the bundle sheath cells and are transported to the mesophyll cells where the enzymes dehydroascorbate reductase (DHAR) and glutathione reductase (GR) are localized and reducing power is available. AA and reduced glutathione (GSH) are returned to the bundle sheath cells for continued antioxidant defense. Under optimal conditions intercellular transport allows adequate cycling of reduced and oxidized forms of antioxidants. Stress situations lead to extensive carbonyl formation in bundle sheath proteins, but not on mesophyll proteins. Insufficient transport capacity in between bundle sheath and mesophyll cells leads to protein damage.

[0503] The model of Kingston-Smith and Foyer predicts that transport of ascorbate or dehydroascorbate is limiting under stress conditions in the bundle sheath of maize. A putative ascorbate/dehydroascorbate transporter has been identified in plants (Horemans et al., 1998), but not cloned. However, vitamin C transporters have been identified in mammalian systems (Daruwala et al., 1999). BLAST searching with the human genes identifies a family of Arabidopsis permeases that may also function as vitamin C transporters. A yeast glutathione transporter has also been recently identified (Bourbouloux et al, 2000). Overexpression of this gene may alter redox balance between different cell types and potentially increase the ability of bundle sheath cells to tolerate oxidative stress.

[0504] In addition to the pathways described above, a number of genes have been shown to increase tolerance to oxidative stress by means that are less well understood. Some of these genes are listed below.

Genes for Improving Tolerance to Oxidative Stress

| Gene | Accession | Phenotype | Reference |
|---|---|---|---|
| Superoxide detoxification | | | |
| FeSOD | P21276 | Maize, alfalfa, | Van Camp, 1997; Van |
| | | tobacco and | Breusegem et al., 1999; |
| | | Synechocystis | Thomas et al., 1999; |
| | | resistance | McKersie et al., 2000 |
| Cu/Zn SOD | | Tobacco resistance | Gupta et al., 1993 |
| Mn SOD | | Yeast, tobacco and | Bowler et al., 1991; Zhu |
| | | alfalfa resistance | and Scandalios, 1992; |
| | | | McKersie et al., 1999 |
| Hydrogen peroxide | | | |
| detoxification | | | |
| Catalase | | Tobacco resistance | Shikanai et al., 1998 |
| Other Mechanisms | | | |
| peroxisomal ascorbate | AAF23294.1 | Tobacco resistance | Wang et al., 1999 |
| peroxidase | | | |
| peroxidase | | Arabidopsis resistance | Ezaki et al., 2000 |
| Glutathione S-transferase | | Arabidopsis resistance | Ezaki et al., 2000 |
| Ferritin* | | Tobacco resistance | Deak et al., 1999 |
| GDP-dissociation inhibitor | | Arabidopsis resistance | Ezaki et al., 2000 |
| Blue copper binding protein | | Arabidopsis resistance | Ezaki et al., 2000 |
| NADPH oxidoreductase | CAA89838.1 | Yeast resistance | Babiychuk et al., 1995; |
| | | | Mano et al., 2000 |
| serine acetyltransferase | | Tobacco resistance | Blaszczyk et al., 1999 |
| 1Cys-peroxiredoxin | | Tobacco resistance | Lee et al., 2000 |
| CEF (sec24) | | Yeast resistance | Belles-Boix et al., 2000a |
| CEO1 | AAC98011.1 | Yeast resistance | Belles-Boix et al., |
| | | | 2000b |
| HSP21 | | <<plant>> resistance | Harndahl et al., 1999 |
| Glyoxalase I* | | Tobacco resistance | Veena et al., 1999 |
| PorA/B | | Arabidopsis seedling | Sperling et al., 1997 |
| | | resistance | |
| 2-cys peroxiredoxin | AAF02131.1 | Antisenese sensitivity | Baier and Dietz, 1999 |
| Thioredoxin m and x | | Yeast resistance | Issakidis-Bourguet et |
| | | | al., 2001 |
| Annexin | AAC49472.1 | Yeast resistance | Gidrol et al., 1996 |

[0505] Many of the genes are likely to play a role in maintaining the redox driven ascorbate-glutathione detoxification cycle (i.e. peroxidase, GST, blue copper protein, thioredoxin, ferritin) or in damage repair (i.e. 1Cys-peroxiredoxin). Vesicular trafficking appears to play a role in resistance to oxidative stress as is evidenced by improved stress tolerance displayed by tobacco and yeast strains overexpressing GDI (Zarsky et al., 1997; Ezaki et al., 2000) and CEF (Belles-Boix et al., 2000a). In other cases the mechanism of action is less clear (i.e. CEO, annexin). Nucleic acid and polypeptide sequences for use in generation of transgenic crop plants having improved properties as described in the above strategy are provided in Table 1.

[0506] 47. ATP Synthesis

[0507] ATP synthase (FoF1-ATPase) is found in the plasma membrane of bacteria and in the thylakoid membrane of chloroplasts and the cristae membrane of mitochondria of higher plants. ATP synthase catalyzes the production of ATP from ADP and inorganic phosphate. ATP provides energy for cell metabolism by converting energy from a transmembrane electrochemical gradient of protons into the phosphoric acid anhydride bond of ATP. FoF1-ATPase consists of a membrane embedded portion (Fo) which contains the proton translocation machinery, and the soluble F1 portion which contains the nucleotide binding site on which ATP is synthesized. When F1 is detached from Fo and decoupled from the proton-motive driving force, it catalyses ATP hydrolysis and released energy. ATP synthases consists of ten different subunits that total more than 20 polypeptide chains (Girvin, 1998; Junge, 1997; Kaim, 1999).

[0508] ATP synthases, also referred to as F-ATPases, are structurally and evolutionarily related to the H+-ATPases located in the plasma membrane of higher plants. This relationship is evident both in their overall structure and the sequence of the membrane spanning proton pump subunits and extrinsic nucleotide binding subunits. However, F-ATPases and H+-ATPases differ in basic function. H+-ATPase couples ATP hydrolysis to proton transport across the membrane generating an electrochemical gradient which is used to drive the secondary transport of various ions and metabolites by carriers and channels (Baunsgaard, 1996; Sze, 1999). H+-ATPase is also thought to play a role in the regulation of cytosolic pH (Morsomme, 1996; Pichon, 1994) and control cell expansion by cell wall acidification (Cosgrove, 1997). It is believed that H+-ATPase is regulated by hormones, light, phytotoxins and environmental stresses (Oufattole, 2000; Michelet, 1995; Wu, 1998; Young, 1998). It possibly acts as an intermediate in certain signal transduction pathways (Michelet, 1995; Palmgren, 1998).

[0509] Aminophospholipid ATPase, a member of a new sub-family of P-type ATPases, was suggested to transport lipid-like molecules across the membrane bilayer conferring cold tolerance (Gomes, 2000). Plants gain cold tolerance when membrane phospholipids remain fluid at lower temperatures. An increased concentration of phosphathidylcholine in the membrane's outer leaflet and an increased concentration of anionic phospholipids in the inner leaflet has been associated with distinct lipid fluidity (Tavernier, 1995). Transmembrane redistribution of aminophospholipids in response to cold has also been reported in poikilothermic animals (Miranda, 1996). An asymmetric distribution of phospholipids could also influence the plant's sensitivity to cold indirectly by interfering with signal transduction pathways. It is known that lipids activate a calcium-dependent protein kinase (Szczegielnial, 2000).

[0510] The F1 sector and Fo sector of ATP synthase were cloned and sequenced from the purple nonsulfur photosynthetic bacterium Rhodobacter capsulans. ATP synthase F1 extrinsic membrane sector consists of five different subunits (α,β,γ, δ, ε) connected by a thin stalk to the second intrinsic membrane sector (Borghese, 1998). The Fo sector also consists of five different subunits: atpI; atpB; atpE; atpX and atpF (Borghese, 1997). The gene structure of ATP synthase has been studied for a number of organisms (reviewed in Boyer, 1997). The atpHAGDC (F1) operon and atpIBEXF (Fo) operon of R. capsulans represents the complete gene sequence of F1Fo-ATPases. Overexpression of ATP synthase may result in corn plants with higher ATP concentrations and therefore, plants which are capable of more vigorous growth.

[0511] H+-ATPases are encoded by a gene family of about ten genes that are differentially expressed depending on cell type, developmental stage and environmental factors (Oufattole, 2000). cDNA clones belonging to two subfamilies have been isolated. Differences between H+-ATPase isoforms have been studied using heterologous expression of Arabidopsis and Nicotiana plumbaginifolia H+-ATPase genes in yeast (Axelsen, 1999; Houlne, 1994; Morsomme, 1998; Palmgren,1994; Piotrowski, 1998; Regenberg, 1995). The data shows that H+-ATPases are not functionally identical. For instance, certain H+-ATPase isoforms might be specialized in different transport functions such as mineral acquisition, phloem loading and stomatal opening (Bouche-Pillon, 1994; DeWitt, 1995; DeWitt. 1991). In N. plumbaginifolia, nine pma (plasma membrane H+ATPase) genes have been identified. Subfamilies I (pma1, pma2, pma3) and II (pma4) represent the major genes expressed. Several transgenic pma4-cosuppressed (reduced expression) plants were produced in tobacco. H+-ATPase activity was reduced by 40-50% as compared to wild type in these plants. Phenotypes were reduced growth, delayed flowering, shorter anther filaments, male sterility, and tip chlorosis of the first mature leaves. Sugar translocation between source and sink tissues via apoplastic phloem loading has been postulated in several species based on the identification of H+/sucrose symporters (Bouche-Pillon, 1994; DeWitt, 1995). PMA4 is expressed in various cell types, but highly expressed in phloem tissue. The apical tissue of transformants with reduced PMA4 expression due to cosuppression showed 29 to 71% less sugar content for sucrose, glucose and fructose, indicating a reduction in translocation from source to sink organs. PMA4 is also expressed in guard cells. In the cosuppressed lines, the guard cells were shriveled and many stomata closed as compared to open wild type stomata (Zhao, 2000).

[0512] Overexpression of PMA4 is expected to result in corn plants that are more vigorous due to greater ion transport across membranes. Also, it is expected to result in plants that are more tolerant to drought stress due to reduced embryo abortion caused by low sucrose transport to sink tissue. Mineral uptake in nutrient poor soils may also augmented.

[0513] CAP1 was cloned from maize roots and shares sequence identity with ER-type Ca2+-ATPases. CAP1 is novel in that it possesses a C-terminal CaM-binding domain characteristic of PM-type pumps. The CAP1 protein was functionally characterized using a yeast expression system. Yeast mutants defective in Ca2+-ATPases were transformed with CAP1 and calcium transport was restored. Structural changes in CaM and the CAP protein, monitored using CD spectra, were typical of CaM target complexes. Other studies have indicated that CaM regulated Ca2+ pumping activity in maize is predominantly distributed in the ER or the tonoplast. CAP1 transcripts in maize roots were induced during the early hours of anoxia. This appeared to indicate a feedback regulation of cytosolic calcium levels during stress stimulated by calmodulin (Subbaiah, 2000). Calmodulin stimulated Ca2-ATPases have been cloned in soybean (Chung, 2000) and Arabidopsis (Geisler, 2000) with similar stress tolerant findings. Overexpression of CAP1 is expected to increase stress tolerance in a plant.

[0514] P-type ATPases are also known. They function by alternately adding and removing a high energy phosphate to an asparate residue to effect the transport of a metal ion. This asparate is contained in a conserved sequence of amino acids typical to the P-type ATPase family (Halleck, 1998). CA2+-ATPases are P-type ATPases. Ca2+ concentration in plant cells is correlated with a variety of external signals such as touch, temperature extremes, ABA, auxin, red light, fungal attack, salinity, drought, anoxia, oxidative stress and hypoxia (reviewed in Bush, 1995). Cellular responses are activated by increased calcium levels which trigger signal transduction pathways, regulation of enzyme activity, ion channel activity and gene expression (Sanders,1999). Ca2+-ATPases are believed to be a major Ca2+ transporter for the endoplasmic reticulum (ER), Golgi apparatus, vacuole, plastid inner membrane and plasma membrane (Liang, 1997;Sanders, 1999). Two distinct types of Ca2+-ATPase pumps have been identified, types IIA and type IIB. Type IIA include ER-type CA2+-ATPases and do not appear to be activated by calmodulin. Type IIB Ca2+ pumps include the plasma membrane type and are stimulated by binding calmodulin (Harper, 1998).

[0515] A novel P-type ATPase has been cloned in Arabidopsis belonging to the gene family of aminophosholipid ATPases represented by ALA1 to ALA11. Hydrophobicity analysis of the ALA1 protein indicated 10 transmembrane helices that were very similar to the other ALA proteins. The biochemical function of ALA1 was performed using a lipid internalization assay in yeast expressing the ALA homolog DRS2. The physiological function of ALA1 was tested by expressing ALA1 in a drs2 mutant strain of yeast. ALA1 restored cold tolerance to the mutant. ALA1 antisense plants were generated in Arabidopsis. When these plants were grown at chilling temperatures, antisense lines had smaller rosettes, smaller stems and fewer siliques than wild type (Gomes, 2000). Overexpression of ALA1 in corn is expeccted to result in a plant with increased cold tolerance.

[0516] Nucleic acid and polypeptide sequences for use in generation of transgenic crop plants having improved properties as described in the above strategy are provided in Table 1.

[0517] 48. ATP/ADP Transporters

[0518] Plant cells synthesize most ATP using oxidative phosphorylation which occurs in the mitochondrial matrix. Mitochondria import ADP from the cytosol and export ATP in exchange. Adenylates (ATP/ADP) cannot penetrate biomembranes due to their size and negative charge. Therefore, this exchange is mediated by an ATP/ADP transporter protein (AAC) located in the mitochondrial inner membrane (Nelson et al, 1993). AAC is a member of the mitochondrial carrier family comprising a large group of transporters with six transmembrane domains that share the same evolutionary ancestor (Aquila et al, 1987). This carrier contains an obligatory one-for-one ATP/ADP exchange mechanism (Schunemann et al, 1993). Yeast has been used to study the function and structure of AAC (Heidkamper et al, 1996; Muller et al, 1996; Muller et al, 1997; Nelson et al, 1993). Overexpression of AAC in corn should alter cytosolic levels of ATP to meet the plant's energy requirements for increased vigor.

[0519] A second adenylate transporter present in the inner membrane of plant plastids has an opposite transport direction. The plastidic ATP/ADP transporter protein (AATP) imports cytosolic ATP in exchange for ADP (Kampfenkel et al, 1995; Neuhaus et al, 1997). These plastidic transport proteins belong to the twelve transmembrane domain family of solute transporters. Plastidic transporters contain an obligatory one-for-one ATP/ADP exchange mechanism but do not share sequence homology with the mitochondrial carrier and are insensitive to AAC inhibitors (reviewed in Winkler and Neuhaus, 1999). Plastidic ATP/ADP transporter genes have been studied in several organisms including spinach, pea and Escherichia coli (Tjaden et al, 1998(a); Tjaden et al. 1998(b)). Novel plastidic transporters have been cloned in Arabidopsis (Mohlmann et al, 1998; Neuhaus et al, 1997). The main function of the plastidic transporter is to supply the plastid's stroma with cytosolic ATP required for anabolic reactions. Starch and fatty acid synthesis catalyzed by ADPglucose pyrophosphorylase and acetyl-CoA carboxylase are strictly dependent on this exogenous supply of ATP (Emes and Nuehaus, 1998).

[0520] Tjaden et al. (1998) reported that ATP/ADP transporter activity may represent a rate-limiting function in plant development. The Arabidopsis thaliana cDNA coding for AATP1 was transformed into potato tubers. Transgenic plants expressing the AATP1 gene in a sense orientation showed a substantial increase in the yield of starch. Plants expression the AATP1 gene in an antisense orientation showed a lower level of AATP expression and tubers were smaller in size than wild-type. The reported results correlated with increased ATP uptake into amyloplasts of plants expressing the gene in a sense orientation and lower uptake of ATP in plants epxressing the gene in an antisense. It is expected that overexpression of an ATP/ADP transporter in maize will result in an increase in yield.

[0521] Nucleic acid and polypeptide sequences for use in generation of transgenic crop plants having improved properties as described in the above strategy are provided in Table 1.

[0522] 49. AAA-type ATPases

[0523] The plastid is the principle site of fatty acid and essential amino acid biosynthesis in a plant cell. Proteins involved in plastid membrane biogenesis and plastid division may have profound impacts on fatty acid and/or essential amino acid biosynthesis, particularly in grains. These proteins will also likely have an impact on photosynthesis, when expressed in photosynthetically active tissues. Proteins required for plastid division and membrane biogenesis may also affect the size and/or the number of plastids.

[0524] AAA, which is an acronym for ATPases Associated to a variety of cellular Activities, belongs to the Walker superfamily of ATPases. Two typical Walker ATPase motifs, named Walker box-A and box B, have been identified in all known AAA ATPase proteins. In addition to these two motifs, AAA-like proteins have a second highly conserved region called the second region of homology (SRH). SRH distinguishes the AAA family from other ATPases. The sequence encompassing Walker box A, box B, and SRH, typically 200-250 amino acids, is termed the AAA cassette. AAA-like proteins usually contain one (type I) or two (type II) copies of the AAA cassette. The number of copies does not appear to define any specific function.

[0525] No common function of the AAA-like protein family has been defined. Although AAA proteins are considered as ATPases, the ATPase activity is low, and the proteins have a low sensitivity to a number of ATPase inhibitors. AAA proteins are involved in various cellular functions, including cell division, uncomplexed protein degradation, vesicle-mediated protein transport, peroxisome biogenesis, and plastid division. Chaperone-like activities of some members have also been reported.

[0526] AAA homologues were identified in maize by similarity searching using the red alga chloroplast AAA gene (FtsHcp; Itoh et al, 1999) as a query. A number of sequences were identified with high homology to FtsHcp. Among these sequences, one has two copies of the AAA cassette, while the rest show one copy. Based on sequence similarity with known AAA-type genes, two families of proteins were identified, chloroplast and nuclear encoded. Furthermore, two families were identified based on the number of AAA cassettes, i.e., sequences containing one or two AAA cassettes. The sequence that shows highest homology to a AAA type protein is investigated for effects on oil and amino acid contents in grain.

[0527] More than 200 members of the AAA family have been identified from bacteria, yeast, animals and plants. No AAA proteins have been reported in maize, but two ESTs from Zea mays were disclosed by Beyer (1997) as AAA-type proteins. Mutations in YME1, a AAA member from Saccharomyces cerevisiae, cause several morphological and functional defects in mitochondria (Thorsness et al. 1993). Furthermore, the chloroplast- and nuclear-encoded red alga FtsH-like genes are suggested to involved in organelle division (Itoh et al. 1999). Overexpression of FtsZ, a plastid division gene, results in the alteration of the size and number of plastids (U.S. Pat. No. 5,981,836).

[0528] It is expected that expression of AAA-type proteins in maize will affect fatty acid and/or amino acid composition of the seed. It is desirable to express AAA-type proteins constituitively or specifically in the developing endosperm or embryo. Furthermore, targeting of the protein to the plastid may be desirable.

[0529] Nucleic acid and polypeptide sequences for use in generation of transgenic crop plants having improved properties as described in the above strategy are provided in Table 1.

[0530] 50. Plant Architecture

[0531] Breeding strategies that select for altered morphological traits such as reduced plant stature (Peng et al., 999) or stem diameter and canopy structure (Gifford and Evans, 1981) have been used to improve yield in wheat, rice and sugarcane. Historically, this approach has also been successful in corn (Doebley and Wang, 1997). However, recent attempts at selection based on morphology alone have not resulted in improved yield in corn plants (Hageman and Lambert, 1988). In spite of this, analysis of the growth of corn plants and modeling studies suggest that corn yields may be improved via changes in canopy architecture (Duncan, 1971; Mock and Pearce, 1975). This knowledge, coupled with recent improvements in the understanding of leaf development (Tsiantis et al., 1999; Byrne et al., 2000), suggests that transgenic strategies to aimed at altering corn leaf size or shape may result in increases in yield due to improved light capture.

[0532] Genes affecting leaf morphology have been identified in maize, rice and Arabidopsis. Nearly all of these genes are transcription factors that may act by altering balances of plant growth regulators. The pleiotropic effects observed when genes affecting leaf morphology are overexpressed in transgenic plants or dominant mutations occur in the endogenous gene suggests that expression of one or more of these genes with a constitutive promoter will identify genes that contribute to plant architecture. Improvements in agronomic performance, such as yield, may require more localized expression in the plant, such as tissue specific or developmentally time expression.

[0533] Arabidopsis transcription factors that alter leaf morphology were identified. These genes may provide a means of engineering leaf or floral architecture to alter crop yield. Genes that are expected to effect plant architecture are described below.

Genes Regulating or Altering Leaf Development

| Gene | Effect | Family | Reference |
|---|---|---|---|
| Rough Sheath2/ | Repressor of knox | Myb family | Tsiantis et al., 1999; |
| Asymmetric leaves1 | genes | | Timmermans et al., 1999 Byrne |
| | | | et al., 2000 |
| Knotted1 | Compound | homeobox | Hareven et al., 1996; |
| | leaves/ectopic | | Nishimura et al., 2000 |
| | veination | | |
| Gnarley1 | Sheath/floral | homeobox | Foster et al., 1999a, b |
| | morphology | | |
| Liguleless3 | blade-to-sheath | homeobox | Muehlbauer et al., 1999 |
| | transformation | | |
| OSH | Ectopic leaves/altered | homeobox | Sentoku et al., 2000 |
| | phylotaxy | | |
| Liguleless1 | Ligule/auricle | Squamosoa | Moreno et al., 1997 |
| | formation and | promoter | |
| | leaf/sheath boundary | binding | |
| Liguleless2 | Ligule/auricle | bZIP | Walsh and Freeling, 1999 |
| | development/phase | | |
| | transition | | |
| Rough sheath 1 | unregulated cell | homeobox | Schneeberger et al., 1995 |
| | division and | | |
| | expansion | | |
| G1411 | Reduced apical | AP2 | |
| | dominance | | |
| G1449 | Larger leaf | AUX_IAA | |
| G1496 | Larger leaf | HLH | |
| G1073 | Larger plants, serrated | AT-Hook | |
| | leaves | | |
| G1635 | Reduced apical | myb | |
| | dominance | | |
| G559 | Reduced apical | bZIP | |
| | dominance | | |
| G865 | Reduced apical | AP2 | |
| | dominance | | |

[0534] Nucleic acid and polypeptide sequences for use in generation of transgenic crop plants having improved properties as described in the above strategy are provided in Table 1.

[0535] 51. Phytosiderophores

[0536] Soil pH has a major effect on nutrient availability to plants. Metal ions, such as iron, have a limited solubility in high pH soils and, therefore, limited availability of metal ions to a plant may be limiting to plant growth and development in high pH soils. In particular, although iron may be abundant in high pH soils, chlorosis may develop as a result of limited iron availability to the plant.

[0537] Graminaceous plants have developed a mechanism for extracting iron from the soil.

[0538] Mugineic acid phtyosiderophores (MAs) are secreted from the roots of graminaceous plants and chelate iron in the soil, thereby increasing its bioavailability. Chelated Fe (III)-phytosiderophore complexes are taken up by the root through the action of a transporter in the plasma membrane.

[0539] Two enzymes were identified that are induced in response to iron deficiency and are believed to be involved in synthesis of MAs, nicotianamine synthase (NAS) and nicotianamine aminotransferase (NAAT) (Takashi et al., 1999). Secretion of MAs is increased under low iron availability conditions and the level of MAs is believed to correlate with the tolerance of a plant to low availability of iron. It is expected that altering NAAT or NAS activity through overexpression of a transgene will increase the tolerance of a plant to low iron availability through increased production of MAs. Expression of a barley NAAT encoding gene in rice increased plant tolerance to low bioavailability of iron (Takahashi et al., 2001)

[0540] A maize gene, ys1 (yellow stripe 1), encoding a transporter of Fe(III)-siderophores has been identified (Curie et al, 2001). It is expected that modified expression of this gene in maize will result in increased iron uptake and plant performance.

[0541] Nucleic acid and polypeptide sequences for use in generation of transgenic crop plants having improved properties as described in the above strategy are provided in Table 1. Expression of these genes is expected to increase bioavailability of iron and agronomic performance in plants, especially under conditions of growth in high pH soils.

[0542] 52. Carbohydrate Transporters

[0543] Photosynthesis in mature plant leaves produces reduced carbon that is distributed to non-photosynthetic tissue and organs. “Sources” are organs such as the mature leaves that export the carbon, primarily in the forms of sugars, and “sinks” are organs such as roots and flowers that import sugars for growth and development. The phloem is a highly specialized tissue that evolved to transport sugars.

[0544] Long distance sugar transport via the phloem is a major determinant of crop yield. Plasmodesmata serve an especially important role in the phloem. Most plant cells are connected with neighboring cells by channels or plasmodesmata that allow small solutes to cross between cells (Mezitt and Lucas, 1996). Very little is known about plasmodesmata at the molecular level. Microscopic observations have determined that during phloem development, specialized pairs of cells called companion cells (CC) and sieve elements (SE) are formed from a common parent cell and they remain tightly connected by plasmodesmata (Overall and Blackman, 1996). As the plant matures, plasmodesmata between sieve elements widen and form sieve plates (Sjolund, 1997). This creates a living tube through which the phloem sap moves (Balachandran et al, 1997; Oparka et al, 1994;).

[0545] The most abundant compound in the phloem sap for most plants is sucrose (Delrot, 1989). There are two mechanisms by which sucrose is loaded/unloaded in the phloem. In symplastic loading, plasmodesmata act as molecular bridges that allow sucrose to move across the cell wall without being transported across a membrane. This transport is passive, down a mass pressure flow gradient. Alternatively, in apoplastic loading, sucrose travels through the extracellular cell wall space from leaf mesophyll cells to the sieve elements. This apoplastic mechanism requires sucrose transporter proteins in the plasma membranes of the sieve elements/companion cells to move it into the phloem (reviewed in Patrick, 1997). These transporters must move the sucrose against a concentration gradient by using the proton motive force created by H+-ATPases (Gahrtz et al, 1994). Once loaded in the phloem, the sucrose is transported osmotically down a pressure flow gradient. The uptake of sucrose into the sieve element is believed to increase the hydrostatic pressure difference between the ends of the phloem conduits so as to drive the mass flow movement of the phloem sap. At the sink tissue, sucrose is unloaded actively into the apoplast and passively down an osmotic gradient for symplastic unloading. Osmolytes such as potassium and amino acids contribute to the driving force of sap flow. The simultaneous withdrawal of osmolytes and water at the sink tissue further increases hydrostatic pressure differences (Delrot, 1989; Galutz et al, 1994; Giaquinta, 1983; Kuhn et al, 1997; vanBel, 1993; Ward et al, 1998).

[0546] Membrane sucrose transport genes have been studied widely (Boorer et al, 1996; Burkle et al, 1998; Gahrtz et al, 1996; Harrington et al, 1997; Hirose et al, 1997; Weise et al, 2000). To clone the plant genes, a yeast strain was generated that was capable of metabolizing internal sucrose due to plant sucrose activity but was unable to hydrolyze extracellular sucrose (Riesmeier et al, 1992). Genes encoding sucrose transporters (SUTs) from spinach and potato were cloned by functional complementation in yeast (Riesmeier et al, 1992, 1993). Several SUT proteins were classified as proton symporters because they were energy dependent and sensitive to protonophores (Matsukura et al, 2000; Shakya and Sturm, 1998; Stadler et al, 1998). Similarly, Arabidopsis SUC1 and SUC2 genes encode sucrose transporters of the proton symporters type (Sauer and Stolz, 1994; Stadler and Sauer, 1996; Truernit and Sauer, 1995; Zhou et al, 1997). The SUT and SUC type transporter genes encode highly hydrophobic proteins with 12 membrane spanning domains. In situ hybridization studies demonstrated that the tobacco SUT1 and Arabidopsis SUC2 encoded proteins are present in the plasma membrane of the companion cell/sieve element complexes (reviewed in Ward, 1998). The SUT1 gene encoding a sucrose transporter was cloned from Nicotiana tabacum and was shown to be involved in phloem loading. Transgenic tobacco plants expressing an antisense SUT1 gene had five-to ten-fold higher leaf sucrose and starch contents than wild type plants, suggesting a reduction in sucrose transport. Plants expressing the antisense SUT1 gene had crinkled leaves, increased anthocyanin and retarded growth rates. Soluble carbohydrates accumulated which led to a reduced rate of photosynthesis. There was a reduction in the development of the roots and delayed or impaired flowering. Efflux measurements of sucrose from the antisense plants showed a strong reduction in phloem transport (Burkle et at, 1998). A similar accumulation of carbohydrates occurred in potato leaves that were cold girdled to block phloem loading (Lemoine et al, 1996).

[0547] Sucrose is unloaded symplasticly via plasmodesmata and it is unloaded into the apoplast of sink tissue. Apoplastic sucrose is imported directly into the sink tissue by SUT/SUC genes or hydrolyzed by an apoplastic invertase into hexoses, i.e., glucose and fructose (Roitsch et al, 1995). The first plant monosaccharide transporter gene HUP1 was cloned from Chlorella kessleri by screening autotrophic versus heterotrophic cells after the addition of hexoses to the medium (Sauer and Tanner, 1989). The hexose carrier function in the plasma membrane of Chenopodium suspension cells was probed by transmembrane exchange diffusion experiments (Gogarten and Bentrup, 1989). The yeast hexose transporters (HXTs) are uniporters (Ozcan and Johnston, 1995) and HUP1 is a symporter (Sauer et al, 1990a; Aoshima et al, 1993). The two genes are homologous and encode proteins with a 12 membrane-spanning domain. Functions were demonstrated by heterologous expression of plant genes in yeast and higher plant hexose transporters were cloned by heterologous hybridization (Sauer et al, 1990b). Additional H+-hexose symporters have been studied (Tubbe and Buckhout, 1992; Weber et al, 1997). The monosaccharide transporter gene family in Arabidopsis is represented by STP (Aoshima et al, 1993; Boorer et al., 1994). The expression patterns of the hexose transporter genes suggest that they function to uptake hexoses into sink tissue (Sauer and Stadler, 1993).

[0548] Since sugar transporter proteins have been proven essential for transporting sugar into developing sink tissue, overexpressed levels of these genes in corn is expected to produce a more vigorous and higher yielding plant.

[0549] Nucleic acid and polypeptide sequences for use in generation of transgenic crop plants having improved properties as described in the above strategy are provided in Table 1.

[0550] 53. Carbon Assimilation

[0551] Atmospheric carbon fixation (photosynthesis-dark reactions) by plants, algae and photosynthetic bacteria represents the source of energy in these organisms. The Calvin cycle, located in the stroma of the chloroplast, is the primary pathway of carbon assimilation in higher plants. Carbon assimilates either leave the cycle as substrates for sucrose or starch biosynthesis or continue through the cycle to regenerate the carbon acceptor molecule, ribulose-1,5-bisphosphate. Sedoheptulose-1,7-bisphosphatase (SBPase) is an enzyme that catalyzes an essentially irreversible reaction in the branch region where Calvin cycle intermediates can be diverted to sucrose and starch biosynthesis, and therefore may be essential in regulating carbon partitioning between the regeneration phase of the Calvin cycle and sucrose and starch biosynthesis.

[0552] SBPase is found only in the chloroplast of higher plants, where it dephosphorylates sedoheptulose-1,7-bisphosphate (SBP) to form sedoheptulose-7-phosphate and inorganic phosphate. This enzyme is specific for sedoheptulose-1,7-bisphosphate and is inhibited by its products as well as glycerate (Schimkat et al., 1990) and fructose-2,6-bisphosphate (Cadet and Meunier, 1988b). Light, a reducing agent, and Mg²⁺ are required for activity (Woodrow, 1982; Cadet and Meunier, 1988a). The enzyme is a homodimer with a subunit molecular mass of 35-38 kDa (Nishizawa and Buchanan, 1981; Cadet and Meunier, 1988c). It has been shown that the removal of more than 80% of the enzymatic activity of SBPase in tobacco plants using antisense expression of an SBPase gene resulted in chlorosis, reduced growth rates, and reduced carbon assimilate levels (Harrison et al, 1998). Reduction in the quantum efficiency of photosystem II was also observed, which resulted in a reduction in the carbohydrate content of leaves. Analysis of carbohydrate content showed that less starch was accumulated, but sucrose levels were maintained. These results indicate that SBPase is a potential rate-limiting step in carbohydrate metabolism.

[0553] Various sedoheptulose 1,7-bisphosphatases have been characterized biochemically, and the corresponding mRNAs (cDNA) have been cloned from an alga (GenBank accession number X74418; Hahn and Kuck, 1994) and some higher plants such as Triticum aestivum (GenBank accession number X65540; Raines et al., 1992), Spinaceae oleracea (GenBank accession number L76556; Martin et al., 1996) and Arabidopsis thaliana (GenBank accession number S74719; Willingham et al. 1994). It is expected that overexpression of a nucleic acid sequence encoding SBPase in a transgenic plant will improve carbon assimilation, export and storag; increased photosynthetic capacity, and extended photosynthetic ability.

[0554] SBPase is regulated by redox activity catalyzed by the thioredoxin/ferredoxin system. In the dark wheat SBPase is inactive due to disulfide bond formation between csyteine residue 52 and cysteine residue 57 (numbers correspond to mature wheat SBPase, Raines et al. 1999). In the light, thioredoxin reduces the disulfide linkage resulting in an active enzyme. It is expected that modifying the cysteine residues through mutagenesis will prevent formation of the disulfide bond and therefore prevent inactivation of the protein by oxidation. Site-directed mutagenesis to change cysteine residue 110 and cysteine residue 115 was performed on Chlorella SBPase in order to permanently deregulate the enzyme. It is expected that overexpression of a deregulated form of SBPase will produce a more beneficial effect on metabolism than overexpressing the wild type enzyme.

[0555] Fructose 1,6 bisphosphate phosphatase (FBPase) has cytosolic and plastidic isoforms. The plastidic form, involved in the Calvin Cycle in higher plants, catalyzes an essential reversible reaction and has therefore been considered as a possible rate limiting reaction for photosynthesis. FBPase, like SBPase, is regulated by redox regulated by light (Chiadmi et al, 1999). It has been shown that the reduction of chloroplastic FBPase activity by antisense expression of an FBPase gene produced a marked reduction in photosynthetic rate and the size and number of starch granules in the leaves of transgenic potato. Thus FBPase is a potential rate-limiting step in photosynthesis.

[0556] Bisphosphatase genes from the facultative chemoautotroph Ralstonia eutropha (Alcaligenes eutrophus) and from the algae Synechococcus lepoliensis encode proteins with a dual activity, FBPase and SBPase, in the Calvin cycle (Yoo and Bowien, 1995; Gerbling et al., 1986). A dual function SBPase/FBPase will be used to test the efficacy of enhancing both phosphatase activities of the Calvin Cycle.

[0557] The Chlorella SBPase and Ralstonia SBPase/FBPase were cloned (WO 00/70062). Chlorella SBPase was deregulated by site directed mutagenesis of csyteine residue 110 and cysteine residue 115 and been shown to deregulate SBPase overexpressed in a transient protoplast system.

[0558] Nucleic acid and polypeptide sequences for use in generation of transgenic crop plants having improved properties as described in the above strategy are provided in Table 1.

[0559] 54. Flavonoids

[0560] Flavonoids are a group of compounds, derived from the phenylpropanoid and acetyl CoA-malonyl CoA pathways. They are ubiquitous in higher plants and present a remarkable structural and functional diversity. Anthocyanins are the glycosylated end products of the pathway that contributes to most of the bright red-purple-violet pigmentation in flowers and fruits of higher plants. Extensive research of the flavonoid pathway in maize, Petunia, and Antirrhinum serve as a knowledge base for the biochemistry, genetics and molecular biology of the pathway for other plant species (Coe et al., 1988, Dooner et al., 1991, De Vlaming et al., 1984, Martin et al., 1991).

[0561] The condensation of p-coumaryl CoA (from the phenylpropanoid pathway) with three molecules of malonyl CoA (produced by the condensation of acetyl CoA and CO₂ catalyzed by acetyl CoA carboxylase), catalyzed by the enzyme chalcone synthase, results in the production of the first flavonoid intermediate, a 5,7,4′-trihydroxychalcone (or chalco-naringenin). Modifications such as hydroxylation, methylation, methoxylation, oxidation/reduction, glycosylation and acylation result in structural variants of flavonoids, including chalcones, aurones, flavones, flavanones, flavonols, dihydrochalcones, flavan 3,4-diols, proanthocyanidins, catechins, biflavonoids, isoflavonoids and anthocyanins.

[0562] Flavonoids are induced under a variety of abiotic and biotic stresses, such as light, cold, and pathogen attack. There is increasing evidence on the stress responsive nature of the flavonoid pathway in higher plants with emphasis on response to UV irradiation and pathogen attack. The accumulation of flavonoids appears to be one of the very first metabolic responses to a variety of stress situations in plants. It is expected that expression of transgenes relating to flavonoid biosynthesis will enhance abiotic and biotic stress resistance in plants.

[0563] Among dicots, the flavonoid biosynthetic pathway has been elucidated in soybean and Arabidopsis. The flavonoid pathway in Arabidopsis was determined based on studies of UV sensitive and altered seed pigmentation mutants. Eleven loci were identified for flavonoid biosynthesis in Arabidopsis (Shirley et al., 1995). Chalcone synthase (CHS), chalcone isomerase (CHI), flavonoid 3′ hydroxylase (F3H), and flavonol synthase (FLS), are encoded by genes expressed early in Arabidopsis development, whereas dihydroflavonol 4-reductase (DFR) and leucoanthocyanidin dioxygenase (LDOX) are encoded by genes expressed late in Arabidopsis development (Pelletier et al., 1999). Several other loci controlling anthocyanin synthesis have also been identified (Albert et al, 1997, Borevitz et al., 2000, Devic et al., 1999).

[0564] In comparison to dicots, there is little information from monocots (in particular cereals) on the role of the flavonoid pathway in stress response. Accumulation of flavones and isovitexin glycosides was demonstrated in rye epidermis (Tevini et al., 1991, Reuber et al., 1996). Furthermore, UV-B induction in rye leads to a significant increase in flavonoids in the epidermal layer (50% of the normal whole leaf levels). Rice seedlings (cv. Purpleputtu) exposed to UV-B showed hyper accumulation of the anthocyanins, cyanidin and peonidin glycosides (Reddy et al., 1994). An increase in isoorientin glycoside derivatives was found in an UV tolerant rice genotype with no such changes in the sensitive line (Markham et al., 1998).

[0565] Cereals accumulate flavonoids upon infection by a range of pathogens. The 3-deoxyanthocyanidins, apigeninidin, luteolinidin and apigeninidin acyl esters were shown to be produced in Sorghum infected with Colletotrichum graminicola (Nicholson et al., 1987, Snyder and Nicholson, 1990, Hipskind et al., 1990, 1996). Studies on the early events during infection of Sorghum indicate the accumulation of these flavonoids as inclusions in cells under attack which finally coalesce and surround the infection site. The resistant and susceptible genotypes of Sorghum were crossed to determine the genetic basis of phytoalexin response. It was observed that all of the resistant progeny plants accumulated the 3-deoxyanthocyanidins to higher levels than the susceptible progeny (Tenkuano et al., 1993). The mold resistant species of Sorghum showed increased accumulation of flavan 4-ols. The probable use of flavan 4-ol content as a marker to select resistant genotypes in field has been suggested (Jambunathan et al., 1990). Flavonoid aglycones are known to be more toxic to pathogens than their glycoside derivatives. Naringenin and several flavonoids were shown to be toxic to rice pathogens (Padmavati et al., 1997).

[0566] The accumulation of anthocyanins in maize upon infection with Helminthosporium maydis was reported by Heim et al. (1993). In resistant plants anthocyanins accumulate in a restricted zone around the lesions. The concentration of these pigments was higher in the resistant than in the susceptible plants. Sakuranetin, a methyl ether of naringenin, was detected in rice leaves under blast infection (Kodama et al., 1992, Grayer et al., 1995) and UV irradiation in rice. The content of sakuranetin in the blast-resistant cultivar was much higher than in a susceptible cultivar (Dillon et al., 1997).

[0567] A hydroxylated product of naringenin, eriodictyol, retards the growth of the corn earworm, Helicoverpa zea, a major insect pest of maize and other crops (Elliger et al., 1980a). Maysin (a C-glycosylflavone), produced in maize silks, deters growth of the corn earworm (Elliger, 1980b). Host-plant resistance to corn earworm by antibiosis is caused by the presence of maysin, apimaysin and methoxymaysin and related compounds in maize silks. The p1 locus encodes a myb-like transcription factor that regulates the synthesis of C-glycosylflavones, phlobaphenes and 3-deoxyanthocyanins. The flavones are oxidized to quinones, which bind amino acids, thereby causing a reduction in available amino acids and inhibition of larval growth. QTLs controlling maysin and apimaysin concentrations have been identified and their association with corn earworm resistance has been shown (Byrne et al., 1996, McMullen et al., 1998).

[0568] A C-glycosylflavonoid from rice, isovitexin, abundant in young leaves of barley and rice hull, was shown to have antioxidant properties (Ramaratnam et al, 1989, Shibamoto et al., 1994).

[0569] The introduction of anthocyanin regulatory gene constructs R (regulatory gene) and C1 (Colored-1) from maize into the glabrous mutant, ttg of Arabidopsis led to the restoration of anthocyanin and trichome production (Lloyd et al., 1992). The use of the R gene as a visible marker for transformation has been demonstrated in maize (Ludwig et al., 1990).

[0570] The isoflavonoid pathway is almost exclusively found in the Leguminosae. The key enzyme that directs the phenylpropanoid pathway intermediates from flavonoids to isoflavonoids is the cytochrome P450 monooxygenase, isoflavone synthase (IFS). The isoflavonoid compounds are well known for their antimicrobial and antioxidant properties. This pathway is absent in cereals. Engineering cereal crops for production of isoflavonoids could be a useful strategy to improve stress response (Padmavati and Reddy, 1999). Recently, the production of isoflavones genistein and daidzein in Arabidopsis and maize was demonstrated by the introduction of soybean IFS (Yu et al., 2000). This indicates that the flavonoid pathway in cereals such as rice, maize and wheat can be extended to produce isoflavonoids.

[0571] The Arabidopsis genes ttg1 and ttg2 have been demonstrated to play a role in regulation of flavonoid accumulation (de Vetten et al., 1997; Walker et al., 1999). Similar to strategies involving overexpression of C1, B, R, P or related transcription factors, overexpression of ttg1, ttg2 or their homologues may result in increased accumulation of flavonoids and potentially enhanced plant performance or pathogen resistance.

[0572] Nucleic acid and polypeptide sequences for use in generation of transgenic crop plants having improved properties as described in the above strategy are provided in Table 1.

[0573] 55. Growth Regulating Factor 1

[0574] Gibberillic acid (GA) plays a major role in regulating stem, hypocotyl, petiole, and internode elongation. In addition GA play a role in germination, flowering and male fertility. A gene was identified in deep water rice (Growth Regulating Factor 1, GRF1, GeneBank Accession No. AF201895), which increases rapidly in rice intemodes in response to GA and submergence (van der Knapp et al., 2000). Arabidopsis plants over expressing the rice GRF1 gene demonstrated reduced elongation of inflorescence stems, reduced apical dominance, female sterility, reduced male fertility, delayed germination, and delayed flowering (van der Knaap, 2000).

[0575] Maize and rice orthologues of GRF1 are disclosed herein. It is expected that expression of GRF1 and GRF1-like genes in a crop plant such as maize will decrease plant height when plants are grown at a high population density, thereby increasing yield.

[0576] Nucleic acid and polypeptide sequences for use in generation of transgenic crop plants having improved properties as described in the above strategy are provided in Table 1.

[0577] It is expected that one or more polynucleotide or polypeptide sequences of the present invention will contribute to crop improvement, preferably in maize, in accordance with the strategies disclosed herein and listed in Table 1. The particular genes and proteins that will confer a desirable phenotype in a crop plant are disclosed in Table 1, wherein each polynucleotide and polypeptide sequence is associated with a strategy for crop improvement. It is further expected that one may over express any of the genes of the present invention or suppress the expression of any one of the genes. Methods for gene suppression, including antisense, cosuppression and RNAi technology are known to those of skill in the art. Furthermore, one may desire to expression one or more of the genes of the present invention under control of a promoter which is tissue specific, developmental timing specific, constituitive or inducible. Suitable promoters for use in the present invention are known to those of skill in the art or disclosed herein. Furthermore, it is expected that one may desire to express the sequences disclosed herein in various subcellular locations, such as nuclei, plastids, including chloroplasts and amyloplasts, mitochondria or other subcellular locations. It addition one may desire to target proteins extracellularly. Extracellular targeting may involve targeting to the endoplasmic reticulum of the cell in the process of movement to the extracellular space. Targeting to subcellular and extracellular locations will involve the use of expression elements such as targeting peptides, e.g, nuclear or chloroplast targeting peptides or other sign peptides such as those that direct proteins to the endoplasmic reticulum and extracellular spaces. A variety of targeting or signal peptides and their uses in plants are known to those of skill in the art or are disclosed herein.

[0578] Of particular interest in the present invention is maize seed characterized by an enhanced phenotype as compared to its parental maize line. Such maize seed is obtainable by observing transformed plants for the above specified traits or for serendipitously imparted phenotypes resulting from the introduction of a transgenic DNA construct into a non-predetermined location in the genomic DNA of tissue from a parental maize line. The transgenic DNA construct is introduced into the genome in sufficient quantity to produce transgenic cells which can be cultured into plants of transgenic maize having an enhanced phenotype as compared to the parental maize line. Such transgenic maize cells are cultured into transgenic plants which produce progeny transgenic seed. Preferably, the screening program is designed to evaluate multiple events of a plurality of distinct transgenic DNA constructs, e.g. from 2 to 20 or more transgenic events of each of from 2 to 20 or more transgenic DNA constructs, e.g. at least 50 or more or up to 100 or more transgenic DNA constructs. Although the design of a transgenic DNA construct can be based on a rational expectation of a phenotype modification, the method of the invention requires observation of an unexpected, yet desired enhanced phenotype. A useful population for screening for unexpected enhanced phenotypes may comprise 40 or more unique transgenic plants, e.g. at least 100 transgenic plants or even up to 1000 or more unique transgenic plants. Even larger populations can be provided by crossing transgenic plants with other plant lines to provide hybrid populations of transgenic plants, such populations can comprises tens of thousands of transgenic plants for screening.

[0579] In methods of this invention transgenic plants and seeds are evaluated for desired phenotypes allowing the selection of seeds. Methods of this invention can be practiced with an optional repeating of a cycle of germinating transgenic seed, growing subsequent generation plants from said transgenic seed, observing phenotypes of said subsequent generation plants and collecting seeds from subsequent generation plants having a desirable enhanced phenotype.

[0580] It is contemplated that transgenic maize seed of this invention characterized by an enhanced phenotype will result from use of not only the heterologous DNA listed in Table 1 but also homolgs, orthologs and/or paralogs of such heterologous DNA or similar DNA which has been artificially modified to avoid or minimize an undesired effect but yet still produce the originally observed enhanced phenotype associated with the heterologous DNA listed in Table 1. Thus, heterologous DNA for use in this invention comprises not only DNA coding for a protein of a polypeptide listed in Table 1, e.g. with an amino acid sequence of SEQ ID NO: 369 to SEQ ID NO: 738, but also DNA coding for a protein with an amino acid sequence which is at least 60% identical, e.g. at least 65%, 70% or 75% identical, in some cases more preferably at least 80%, 85%, 90% or 95% identical, to a sequence of SEQ ID NO: 369 to SEQ ID NO: 739. In another aspect of this invention the transgenic maize with an enhanced trait is provided by using heterologous DNA with a nucleic acid sequence of SEQ ID NO: 1 to SEQ ID NO: 368 or a homologous DNA coding for a protein of similar function but with a nucleic acid sequence which is at least 70% identical, e.g. at least 75%, 80%, 85%, 90% or 95% identical, to a sequence of SEQ ID NO: I to SEQ ID NO: 368. Sequence identity is determined over a sequence of substantially the full length of a sequence listed in Table 1.

[0581] E. Methods for Plant Transformation

[0582] Suitable methods for plant transformation for use with the current invention are believed to include virtually any method by which DNA can be introduced into a cell, such as by direct delivery of DNA such as by PEG-mediated transformation of protoplasts (Omirulleh et al., 1993), by desiccation/inhibition-mediated DNA uptake (Potrykus et al., 1985), by electroporation (U.S. Pat. No. 5,384,253, specifically incorporated herein by reference in its entirety), by agitation with silicon carbide fibers (Kaeppler et al., 1990; U.S. Pat. No. 5,302,523, and U.S. Pat. No. 5,464,765, each specifically incorporated herein by reference in their entirety), by Agrobacterium-mediated transformation (U.S. Pat. No. 5,591,616 and U.S. Pat. No. 5,563,055; each specifically incorporated herein by reference) and by acceleration of DNA coated particles (U.S. Pat. No. 5,550,318; U.S. Pat. No. 5,538,877; and U.S. Pat. No. 5,538,880; each specifically incorporated herein by reference in their entirety), etc. Through the application of techniques such as these, maize cells as well as those of virtually any other plant species may be stably transformed, and these cells developed into transgenic plants. In certain embodiments, acceleration methods are preferred and include, for example, microprojectile bombardment and the like.

[0583] 1. Electroporation

[0584] Where one wishes to introduce DNA by means of electroporation, it is contemplated that the method of Krzyzek et al. (U.S. Pat. No. 5,384,253, incorporated herein by reference in its entirety) will be particularly advantageous. In this method, certain cell wall-degrading enzymes, such as pectin-degrading enzymes, are employed to render the target recipient cells more susceptible to transformation by electroporation than untreated cells. Alternatively, recipient cells are made more susceptible to transformation by mechanical wounding.

[0585] To effect transformation by electroporation, one may employ either friable tissues, such as a suspension culture of cells or embryogenic callus or alternatively one may transform immature embryos or other organized tissue directly. In this technique, one would partially degrade the cell walls of the chosen cells by exposing them to pectin-degrading enzymes (pectolyases) or mechanically wounding in a controlled manner. Examples of some species which have been transformed by electroporation of intact cells include maize (U.S. Pat. No. 5,384,253; D'Halluin et al, 1992), wheat (Zhou et al., 1993), and soybean (Christou et al., 1987).

[0586] One also may employ protoplasts for electroporation transformation of plants (Bates, 1994; Lazzeri, 1995). For example, the generation of transgenic soybean plants by electroporation of cotyledon-derived protoplasts is described by Dhir and Widholm in PCT Publication WO 92/17598 (specifically incorporated herein by reference). Other examples of species for which protoplast transformation has been described include barley (Lazerri, 1995), sorghum (Battraw and Hall, 1991), maize (Bhattacharjee et al., 1997), wheat (He et al., 1994) and tomato (Tsukada, 1989).

[0587] 2. Microprojectile Bombardment

[0588] One method for delivering transforming DNA segments to plant cells in accordance with the invention is microprojectile bombardment (U.S. Pat. No. 5,550,318; U.S. Pat. No. 5,538,880; U.S. Pat. No. 5,610,042; and PCT Publication WO 95/06128; each of which is specifically incorporated herein by reference in its entirety). In this method, particles may be coated with nucleic acids and delivered into cells by a propelling force. Exemplary particles include those comprised of tungsten, platinum, and preferably, gold. It is contemplated that in some instances DNA precipitation onto metal particles would not be necessary for DNA delivery to a recipient cell using microprojectile bombardment. However, it is contemplated that particles may contain DNA rather than be coated with DNA. Hence, it is proposed that DNA-coated particles may increase the level of DNA delivery via particle bombardment but are not, in and of themselves, necessary.

[0589] For the bombardment, cells in suspension are concentrated on filters or solid culture medium. Alternatively, immature embryos or other target cells may be arranged on solid culture medium. The cells to be bombarded are positioned at an appropriate distance below the macroprojectile stopping plate.

[0590] An illustrative embodiment of a method for delivering DNA into plant cells by acceleration is the Biolistics Particle Delivery System (BioRad, Hercules, Calif.), which can be used to propel particles coated with DNA or cells through a screen, such as a stainless steel or Nytex screen, onto a filter surface covered with monocot plant cells cultured in suspension. The screen disperses the particles so that they are not delivered to the recipient cells in large aggregates. It is believed that a screen intervening between the projectile apparatus and the cells to be bombarded reduces the size of projectiles aggregate and may contribute to a higher frequency of transformation by reducing the damage inflicted on the recipient cells by projectiles that are too large.

[0591] Microprojectile bombardment techniques are widely applicable, and may be used to transform virtually any plant species. Examples of species for which have been transformed by microprojectile bombardment include monocot species such as maize (PCT Publication WO 95/06128), barley (Ritala et al., 1994; Hensgens et al., 1993), wheat (U.S. Pat. No. 5,563,055, specifically incorporated herein by reference in its entirety), rice (Hensgens et al., 1993), oat (Torbet et al., 1995; Torbet et al., 1998), rye (Hensgens et al., 1993), sugarcane (Bower et al., 1992), and sorghum (Casa et al, 1993; Hagio et al., 1991); as well as a number of dicots including tobacco (Tomes et al., 1990; Buising and Benbow, 1994), soybean (U.S. Pat. No. 5,322,783, specifically incorporated herein by reference in its entirety), sunflower (Knittel et al. 1994), peanut (Singsit et al., 1997), cotton (McCabe and Martinell, 1993), tomato (Van Eck et al. 1995), and legumes in general (U.S. Pat. No. 5,563,055, specifically incorporated herein by reference in its entirety).

[0592] 3. Agrobacterium-Mediated Transformation

[0593] Agrobacterium-mediated transfer is a preferred system that is widely applicable for introducing genes into plant. The use of Agrobacterium-mediated plant integrating vectors to introduce DNA into plant cells is well known in the art. See, for example, the methods described by Fraley et al. (1985), Rogers et al. (1987) and U.S. Pat. No. 5,563,055, specifically incorporated herein by reference in its entirety.

[0594] Agrobacterium-mediated transformation is most efficient in dicotyledonous plants and is the preferable method for transformation of dicots, including Arabidopsis, tobacco, tomato, and potato. Indeed, while Agrobacterium-mediated transformation has been routinely used with dicotyledonous plants for a number of years, it has only recently become applicable to monocotyledonous plants. Advances in Agrobacterium-mediated transformation techniques have now made the technique applicable to nearly all monocotyledonous plants. For example, Agrobacterium-mediated transformation techniques have now been applied to rice (Hiei et al, 1997; Zhang et al., 1997; U.S. Pat. No. 5,591,616, specifically incorporated herein by reference in its entirety), wheat (McCormac et al., 1998), barley (Tingay et al., 1997; McCormac et al., 1998), and maize (Ishida et al., 1996; U.S. Pat. No. 5,981,840).

[0595] Modern Agrobacterium transformation vectors are capable of replication in E. coli as well as Agrobacterium, allowing for convenient manipulations as described (Klee et al, 1985). Moreover, recent technological advances in vectors for Agrobacterium-mediated gene transfer have improved the arrangement of genes and restriction sites in the vectors to facilitate the construction of vectors capable of expressing various polypeptide encoding genes. The vectors described (Rogers et al., 1987) have convenient multi-linker regions flanked by a promoter and a polyadenylation site for direct expression of inserted polypeptide encoding genes and are suitable for present purposes. In addition, Agrobacterium containing both armed and disarmed Ti genes can be used for the transformations. In those plant strains where Agrobacterium-mediated transformation is efficient, it is the method of choice because of the facile and defined nature of the gene transfer.

[0596] A number of wild-type and disarmed strains of Agrobacterium tumefaciens and Agrobacterium rhizogenes harboring Ti or Ri plasmids can be used for gene transfer into plants. Preferably, the Agrobacterium hosts contain disarmed Ti and Ri plasmids that do not contain the oncogenes which cause tumorigenesis or rhizogenesis, respectively, which are used as the vectors and contain the genes of interest that are subsequently introduced into plants. Preferred strains would include but are not limited to Agrobacterium tumefaciens strain C58, a nopaline-type strain that is used to mediate the transfer of DNA into a plant cell, octopine-type strains such as LBA4404 or succinamopine-type strains e.g., EHA101 or EHA105. The use of these strains for plant transformation has been reported and the methods are familiar to those of skill in the art.

[0597] Those of skill in the art are aware of the typical steps in the plant transformation process. The Agrobacterium can be prepared either by inoculating a liquid such as Luria Burtani (LB) media directly from a glycerol stock or streaking the Agrobacterium onto a solidified media from a glycerol stock, allowing the bacteria to grow under the appropriate selective conditions, generally from about 26° C.-30° C., more preferably about 28° C., and taking a single colony from the plate and inoculating a liquid culture medium containing the selective agents. Alternatively a loopful or slurry of Agrobacterium can be taken from the plate and resuspended in liquid and used for inoculation. Those of skill in the art are familiar with procedures for growth and suitable culture conditions for Agrobacterium as well as subsequent inoculation procedures. The density of the Agrobacterium culture used for inoculation and the ratio of Agrobacterium cells to explant can vary from one system to the next, and therefore optimization of these parameters for any transformation method is expected.

[0598] Typically, an Agrobacterium culture is inoculated from a streaked plate or glycerol stock and is grown overnight, and the bacterial cells are washed and resuspended in a culture medium suitable for inoculation of the explant. Suitable inoculation media for the present invention include, but are not limited ½ MSPL (2.2 g/L GIBCO (Carlsbad, Calif.) MS salts, 2 mg/L glycine, 0.5 g/L niacin, 0.5 g/L L-pyridoxine-HCl, 0.1 mg/L thiamine, 115 g/L L-proline, 26 g/L D-glucose, 68.5 g/L sucrose, pH 5.4) or ½ MS VI (2.2 g/L GIBCO (Carlsbad, Calif.) MS salts, 2 mg/L glycine, 0.5 g/L niacin, 0.5 g/L L-pyridoxine-HCl, 0.1 mg/L thiamine, 115 g/L L-proline, 10 g/L D-glucose, and 10 g/L sucrose, pH 5.4). The inoculation media may be supplemented with a growth inhibiting agent (PCT Publication WO 01/09302). The range and concentration of the growth inhibition agent can vary and depends of the agent and plant system. Growth inhibiting agents including, but not limited to, silver nitrate, silver thiosulfate, or carbenicillin are the preferred growth inhibition agents. The growth inhibiting agent is added in the amount necessary to achieve the desired effect. Silver nitrate is preferably used in the inoculation media at a concentration of about 1 μM (micromolar) to 1 mM (millimolar), more preferably 5 μM-100 μM. The concentration of carbenicillin used in the inoculation media is about 5 mg/L to 100 mg/L, more preferably about 50 mg/L. A compound which induces Agrobacterium virulence genes such as acetosyringone can also be added to the inoculation medium.

[0599] In a preferred embodiment, the Agrobacterium used for inoculation are pre-induced in a medium such as a buffered media with appropriate salts containing acetosyringone, a carbohydrate, and selective antibiotics. In a preferred embodiment, the Agrobacterium cultures used for transformation are pre-induced by culturing at about 28° C. in AB-glucose minimal medium (Chilton et al., 1974; Lichtenstein and Draper, 1986) supplemented with acetosyringone at about 200 μM and glucose at about 2%. The concentration of selective antibiotics for Agrobacterium in the pre-induction medium is about half the concentation normally used in selection. The density of the Agrobacterium cells used is about 10⁷-10¹⁰ cfu/ml of Agrobacterium. More preferably, the density of Agrobacterium cells used is about 5×10⁸−4×10⁹ cfu/me. Prior to inoculation the Agrobacterium can be washed in a suitable media such as ½ MS.

[0600] The next stage of the transformation process is the inoculation. In this stage the explants and Agrobacterium cell suspensions are mixed together. The mixture of Agrobacterium and explant(s) can also occur prior to or after a wounding step. By wounding as used herein is meant any method to disrupt the plant cells thereby allowing the Agrobacterium to interact with the plant cells. Those of skill in the art are aware of the numerous methods for wounding. These methods would include, but are not limited to, particle bombardment of plant tissues, sonicating, vacuum infiltrating, shearing, piercing, poking, cutting, or tearing plant tissues with a scalpel, needle or other device. The duration and condition of the inoculation and Agrobacterium cell density will vary depending on the plant transformation system. The inoculation is generally performed at a temperature of about 15° C.-30° C., preferably 23° C.-28° C. from less than one minute to about 3 hours. The inoculation can also be done using a vacuum infiltration system.

[0601] After inoculation, any excess Agrobacterium suspension can be removed and the Agrobacterium and target plant material are co-cultured. The co-culture refers to the time post-inoculation and prior to transfer to a delay or selection medium. Any number of plant tissue culture media can be used for the co-culture step. For the present invention, a reduced salt media such as half-strength MS-based co-culture media is used and the media lacks complex media additives including but not limited to undefined additives such as casein hydolysate, and B5 vitamins and organic additives. Plant tissues after inoculation with Agrobacterium can be cultured in a liquid media. More preferably, plant tissues after inoculation with Agrobacterium are cultured on a semi-solid culture medium solidified with a gelling agent such as agarose, more preferably a low EEO agarose. The co-culture duration is from about one hour to 72 hours, preferably less than 36 hours, more preferably about 6 hours to 35 hours. The co-culture media can contain one or more Agrobacterium growth inhibiting agent(s) or combination of growth inhibiting agents such as silver nitrate, silver thiosulfate, or carbenicillin. The concentration of silver nitrate or silver thiosulfate is preferably about 1 μM to 1 mM, more preferably about 5 μM to 100 μM, even more preferably about 10 μM to 50 μM, most preferably about 20 μM. The concentration of carbenicillin in the co-culture medium is preferably about 5 mg/L to 100 mg/L more preferably 10 mg/L to 50 mg/L, even more preferably about 50 mg/L. The co-culture is typically performed for about one to three days more preferably for less than 24 hours at a temperature of about 18° C.-30° C., more preferably about 23° C.-25° C. The co-culture can be performed in the light or in light-limiting conditions. Preferably, the co-culture is performed in light-limiting conditions. By light-limiting conditions as used herein is meant any conditions which limit light during the co-culture period including but not limited to covering a culture dish containing the plant/Agrobacterium mixture with a cloth, foil , or placing the culture dishes in a black bag, or placing the cultured cells in a dark room. Lighting conditions can be optimized for each plant system as is known to those of skill in the art.

[0602] After co-culture with Agrobacterium, the explants can be placed directly onto selective media. The explants can be sub-cultured onto selective media in successive steps or stages. For example, the first selective media can contain a low amount of selective agent, and the next sub-culture can contain a higher concentration of selective agent or vice versa. The explants can also be placed directly on a fixed concentration of selective agent. Alternatively, after co-culture with Agrobacterium, the explants can be placed on media without the selective agent. Those of skill in the art are aware of the numerous modifications in selective regimes, media, and growth conditions that can be varied depending on the plant system and the selective agent. In the preferred embodiment, after incubation on non-selective media containing the antibiotics to inhibit Agrobacterium growth without selective agents, the explants are cultured on selective growth media. Typical selective agents include but are not limited to antibiotics such as geneticin (G418), kanamycin, paromomycin, herbicides such as glyphosate or phosephinothericine, or other growth inhibitory compounds such as amino acid analogues, e.g., 5 methyltryptophan. Additional appropriate media components can be added to the selection or delay medium to inhibit Agrobacterium growth. Such media components can include, but are not limited to antibiotics such as carbenicillin or cefotaxime.

[0603] After the co-culture step, and preferably before the explants are placed on selective or delay media, cells can be analyzed for efficiency of DNA delivery by a transient assay that can be used to detect the presence of one or more gene(s) contained on the transformation vector, including, but not limited to a screenable marker gene such as the gene that codes for β-glucuronidase (GUS). The total number of blue spots (indicating GUS expression) for a selected number of explants is used as a positive correlation of DNA transfer efficiency. The efficiency of T-DNA delivery and the effect of various culture condition manipulations on T-DNA delivery can be tested in transient analyses as described. A reduction in the T-DNA transfer process can result in a decrease in copy number and complexity of integration as complex integration patterns can originate from co-integration of separate T-DNAs (DeNeve et al., 1997). The effect of culture conditions of the target tissue can be tested by transient analyses and more preferably, in stably transformed plants. Any number of methods are suitable for plant analyses, including but not limited to, histochemical assays, biological assays, and molecular analyses.

[0604] After effecting delivery of exogenous DNA to recipient cells, the next steps generally concern identifying the transformed cells for further culturing and plant regeneration. As mentioned herein, in order to improve the ability to identify transformants, one may desire to employ a selectable or screenable marker gene as, or in addition to, the expressible gene of interest. In this case, one would then generally assay the potentially transformed cell population by exposing the cells to a selective agent or agents, or one would screen the cells for the desired marker gene trait.

[0605] 4. Other Transformation Methods

[0606] Transformation of plant protoplasts can be achieved using methods based on calcium phosphate precipitation, polyethylene glycol treatment, electroporation, and combinations of these treatments (see, e.g., Potrykus et al., 1985; Lorz et al., 1985; Omirulleh et al., 1993; Fromm et al., 1986; Uchimiya et al., 1986; Callis et al., 1987; Marcotte et al., 1988).

[0607] Application of these systems to different plant strains depends upon the ability to regenerate that particular plant strain from protoplasts. Illustrative methods for the regeneration of cereals from protoplasts have been described (Toriyama et al., 1986; Yamada et al., 1986; Abdullah et al., 1986; Omirulleh et al., 1993 and U.S. Pat. No. 5,508,184; each specifically incorporated herein by reference in its entirety). Examples of the use of direct uptake transformation of cereal protoplasts include transformation of rice (Ghosh-Biswas et al., 1994), sorghum (Battraw and Hall, 1991), barley (Lazerri, 1995), oat (Zheng and Edwards, 1990) and maize (Omirulleh et al., 1993).

[0608] To transform plant strains that cannot be successfully regenerated from protoplasts, other ways to introduce DNA into intact cells or tissues can be utilized. For example, regeneration of cereals from immature embryos or explants can be effected as described (Vasil, 1989). Also, silicon carbide fiber-mediated transformation may be used with or without protoplasting (Kaeppler, 1990; Kaeppler et al., 1992; U.S. Pat. No. 5,563,055, specifically incorporated herein by reference in its entirety). Transformation with this technique is accomplished by agitating silicon carbide fibers together with cells in a DNA solution. DNA passively enters as the cells are punctured. This technique has been used successfully with, for example, the monocot cereals maize (PCT Publication WO 95/06128, specifically incorporated herein by reference in its entirety; Thompson, 1995) and rice (Nagatani, 1997).

[0609] F. Selection

[0610] It is believed that DNA is introduced into only a small percentage of target cells in any one experiment. In order to provide an efficient system for identification of those cells receiving DNA and integrating it into their genomes one may employ a means for selecting those cells that are stably transformed. One exemplary embodiment of such a method is to introduce into the host cell, a marker gene which confers resistance to some normally inhibitory agent, such as an antibiotic or herbicide. Examples of antibiotics which may be used include the aminoglycoside antibiotics neomycin, kanamycin, G418 and paromomycin, or the antibiotic hygromycin. Resistance to the aminoglycoside antibiotics is conferred by aminoglycoside phosphostransferase enzymes such as neomycin phosphotransferase II (NPT II) or NPT I, whereas resistance to hygromycin is conferred by hygromycin phosphotransferase.

[0611] Potentially transformed cells then are exposed to the selective agent. In the population of surviving cells will be those cells where, generally, the resistance-conferring gene has been integrated and expressed at sufficient levels to permit cell survival. Cells may be tested further to confirm stable integration of the exogenous DNA. Using the techniques disclosed herein, greater than 40% of bombarded embryos may yield transformants.

[0612] One example of a herbicide which is useful for selection of transformed cell lines in the practice of the invention is the broad spectrum herbicide glyphosate. Glyphosate inhibits the action of the enzyme EPSPS, which is active in the aromatic amino acid biosynthetic pathway. Inhibition of this enzyme leads to starvation for the amino acids phenylalanine, tyrosine, and tryptophan and secondary metabolites derived thereof. U.S. Pat. No. 4,535,060 describes the isolation of EPSPS mutations which confer glyphosate resistance on the Salmonella typhimurium gene for EPSPS, aroA. The EPSPS gene was cloned from Zea mays and mutations similar to those found in a glyphosate resistant aroA gene were introduced in vitro. Mutant genes encoding glyphosate resistant EPSPS enzymes are described in, for example, PCT Publication WO 97/04103. The best characterized mutant EPSPS gene conferring glyphosate resistance comprises amino acid changes at residues 102 and 106, although it is anticipated that other mutations will also be useful (PCT Publication WO 97/04103). Furthermore, a naturally occurring glyphosate resistant EPSPS may be used, e.g., the CP4 gene isolated from Agrobacterium encodes a glyphosate resistant EPSPS (U.S. Pat. No. 5,627,061).

[0613] To use the bar-bialaphos or the EPSPS-glyphosate selective systems, tissue is cultured for 0-28 days on nonselective medium and subsequently transferred to medium containing from 1-3 mg/l bialaphos or 1-3 mM glyphosate as appropriate. While ranges of 1-3 mg/l bialaphos or 1-3 mM glyphosate will typically be preferred, it is believed that ranges of 0.1-50 mg/l bialaphos or 0.1-50 mM glyphosate will find utility in the practice of the invention. Bialaphos and glyphosate are provided as examples of agents suitable for selection of transformants, but the technique of this invention is not limited to them.

[0614] Another herbicide which constitutes a desirable selection agent is the broad spectrum herbicide bialaphos. Bialaphos is a tripeptide antibiotic produced by Streptomyces hygroscopicus and is composed of phosphinothricin (PPT), an analogue of L-glutamic acid, and two L-alanine residues. Upon removal of the L-alanine residues by intracellular peptidases, the PPT is released and is a potent inhibitor of glutamine synthetase (GS), a pivotal enzyme involved in ammonia assimilation and nitrogen metabolism (Ogawa et al, 1973). Synthetic PPT, the active ingredient in the herbicide Liberty™ also is effective as a selection agent. Inhibition of GS in plants by PPT causes the rapid accumulation of ammonia and death of the plant cells.

[0615] The organism producing bialaphos and other species of the genus Streptomyces also synthesizes an enzyme phosphinothricin acetyl transferase (PAT) which is encoded by the bar gene in Streptomyces hygroscopicus and the pat gene in Streptomyces viridochromogenes. The use of the herbicide resistance gene encoding phosphinothricin acetyl transferase (PAT) is referred to in DE 3642 829 A, wherein the gene is isolated from Streptomyces viridochromogenes. In the bacterial source organism, this enzyme acetylates the free amino group of PPT preventing auto-toxicity (Thompson et al., 1987). The bar gene has been cloned (Murakami et al., 1986; Thompson et al., 1987) and expressed in transgenic tobacco, tomato, potato (De Block et al., 1987) Brassica (De Block et al., 1989) and maize (U.S. Pat. No. 5,550,318). In previous reports, some transgenic plants which expressed the resistance gene were completely resistant to commercial formulations of PPT and bialaphos in greenhouses.

[0616] It further is contemplated that the herbicide dalapon, 2,2-dichloropropionic acid, may be useful for identification of transformed cells. The enzyme 2,2-dichloropropionic acid dehalogenase (deh) inactivates the herbicidal activity of 2,2-dichloropropionic acid and therefore confers herbicidal resistance on cells or plants expressing a gene encoding the dehalogenase enzyme (Buchanan-Wollaston et al., 1992; U.S. Pat. No. 5,780,708).

[0617] Alternatively, a gene encoding anthranilate synthase, which confers resistance to certain amino acid analogs, e.g., 5-methyltryptophan or 6-methyl anthranilate, may be useful as a selectable marker gene. The use of an anthranilate synthase gene as a selectable marker was described in U.S. Pat. No. 5,508,468 and U.S. Pat. No. 6,118,047.

[0618] An example of a screenable marker trait is the red pigment produced under the control of the R-locus in maize. This pigment may be detected by culturing cells on a solid support containing nutrient media capable of supporting growth at this stage and selecting cells from colonies (visible aggregates of cells) that are pigmented. These cells may be cultured further, either in suspension or on solid media. In a similar fashion, the introduction of the C1 and B genes will result in pigmented cells and/or tissues.

[0619] The enzyme luciferase may be used as a screenable marker in the context of the present invention. In the presence of the substrate luciferin, cells expressing luciferase emit light which can be detected on photographic or x-ray film, in a luminometer (or liquid scintillation counter), by devices that enhance night vision, or by a highly light sensitive video camera, such as a photon counting camera. All of these assays are nondestructive and transformed cells may be cultured further following identification. The photon counting camera is especially valuable as it allows one to identify specific cells or groups of cells that are expressing luciferase and manipulate cells expressing in real time. Another screenable marker which may be used in a similar fashion is the gene coding for green fluorescent protein (GFP) or a gene coding for other fluorescing proteins such as DsRed® (Clontech, Palo Alto, Calif.).

[0620] It further is contemplated that combinations of screenable and selectable markers will be useful for identification of transformed cells. In some cell or tissue types a selection agent, such as bialaphos or glyphosate, may either not provide enough killing activity to clearly recognize transformed cells or may cause substantial nonselective inhibition of transformants and nontransformants alike, thus causing the selection technique to not be effective. It is proposed that selection with a growth inhibiting compound, such as bialaphos or glyphosate at concentrations below those that cause I 00% inhibition followed by screening of growing tissue for expression of a screenable marker gene such as luciferase or GFP would allow one to recover transformants from cell or tissue types that are not amenable to selection alone. It is proposed that combinations of selection and screening may enable one to identify transformants in a wider variety of cell and tissue types. This may be efficiently achieved using a gene fusion between a selectable marker gene and a screenable marker gene, for example, between an NPTII gene and a GFP gene (WO 99/60129).

[0621] G. Regeneration and Seed Production

[0622] Cells that survive the exposure to the selective agent, or cells that have been scored positive in a screening assay, may be cultured in media that supports regeneration of plants. In an exemplary embodiment, MS and N6 (Chu et al., 1975) media may be modified by including further substances such as growth regulators. Preferred growth regulators for plant regeneration include cytokins such as 6-benzylamino pierine, zeahin or the like, and abscisic acid. Media improvement in these and like ways has been found to facilitate the growth of cells at specific developmental stages. Tissue may be maintained on a basic media with auxin type growth regulators until sufficient tissue is available to begin plant regeneration efforts, or following repeated rounds of manual selection, until the morphology of the tissue is suitable for regeneration, then transferred to media conducive to maturation of embryoids. Cultures are transferred every 1-4 weeks, preferably every 2-3 weeks on this medium. Shoot development will signal the time to transfer to medium lacking growth regulators.

[0623] The transformed cells, identified by selection or screening and cultured in an appropriate medium that supports regeneration, will then be allowed to mature into plants. Developing plantlets were transferred to soiless plant growth mix, and hardened off, e.g., in an environmentally controlled chamber at about 85% relative humidity, 600 ppm CO₂, and 25-250 microeinsteins m⁻²s⁻¹ of light, prior to transfer to a greenhouse or growth chamber for maturation. Plants are preferably matured either in a growth chamber or greenhouse. Plants are regenerated from about 6 wk to 10 months after a transformant is identified, depending on the initial tissue. During regeneration, cells are grown on solid media in tissue culture vessels. Illustrative embodiments of such vessels are petri dishes and Plant Cons. Regenerating plants are preferably grown at about 19 to 28° C. After the regenerating plants have reached the stage of shoot and root development, they may be transferred to a greenhouse for further growth and testing. Plants may be pollinated using conventional plant breeding methods known to those of skill in the art and seed produced.

[0624] Progeny may be recovered from transformed plants and tested for expression of the exogenous expressible gene. Note however, that seeds on transformed plants may occasionally require embryo rescue due to cessation of seed development and premature senescence of plants. To rescue developing embryos, they are excised from surface-disinfected seeds 10-20 days post-pollination and cultured. An embodiment of media used for culture at this stage comprises MS salts, 2% sucrose, and 5.5 g/l agarose. In embryo rescue, large embryos (defined as greater than 3 mm in length) are germinated directly on an appropriate media. Embryos smaller than that may be cultured for 1 wk on media containing the above ingredients along with 10⁻⁵M abscisic acid and then transferred to growth regulator-free medium for germination.

[0625] H. Characterization

[0626] To confirm the presence of the exogenous DNA or “transgene(s)” in the regenerating plants, a variety of assays may be performed. Such assays include, for example, “molecular biological” assays, such as Southern and Northern blotting and PCR; “biochemical” assays, such as detecting the presence of a protein product, e.g., by immunological means (ELISAs and Western blots) or by enzymatic function; plant part assays, such as leaf or root assays; and also, by analyzing the phenotype of the whole regenerated plant.

[0627] 1. DNA Integration, RNA Expression and Inheritance

[0628] Genomic DNA may be isolated from callus cell lines or any plant parts to determine the presence of the exogenous gene through the use of techniques well known to those skilled in the art. Note, that intact sequences will not always be present, presumably due to rearrangement or deletion of sequences in the cell.

[0629] The presence of DNA elements introduced through the methods of this invention may be determined by polymerase chain reaction (PCR). Using this technique discreet fragments of DNA are amplified and detected by gel electrophoresis. This type of analysis permits one to determine whether a gene is present in a stable transformant, but does not necessarily prove integration of the introduced gene into the host cell genome. Typically, DNA has been integrated into the genome of all transformants that demonstrate the presence of the gene through PCR analysis. In addition, it is not possible using PCR techniques to determine whether transformants have exogenous genes introduced into different sites in the genome, i.e., whether transformants are of independent origin. Using PCR techniques it is possible to clone fragments of the host genomic DNA adjacent to an introduced gene.

[0630] Positive proof of DNA integration into the host genome and the independent identities of transformants may be determined using the technique of Southern hybridization. Using this technique specific DNA sequences that were introduced into the host genome and flanking host DNA sequences can be identified. Hence the Southern hybridization pattern of a given transformant serves as an identifying characteristic of that transformant. In addition, it is possible through Southern hybridization to demonstrate the presence of introduced genes in high molecular weight DNA, i.e., confirm that the introduced gene has been integrated into the host cell genome. The technique of Southern hybridization provides information that is obtained using PCR, e.g., the presence of a gene, but also demonstrates integration into the genome and characterizes each individual transformant.

[0631] It is contemplated that using the techniques of dot or slot blot hybridization, which are modifications of Southern hybridization techniques, one could obtain the same information that is derived from PCR, e.g., the presence of a gene.

[0632] Both PCR and Southern hybridization techniques can be used to demonstrate transmission of a transgene to progeny. In most instances the characteristic Southern hybridization pattern for a given transformant will segregate in progeny as one or more Mendelian genes (Spencer et al., 1992) indicating stable inheritance of the transgene. Whereas DNA analysis techniques may be conducted using DNA isolated from any part of a plant, RNA will only be expressed in particular cells or tissue types and hence it will be necessary to prepare RNA for analysis from these tissues. PCR techniques, referred to as RT-PCR, also may be used for detection and quantitation of RNA produced from introduced genes. In this application of PCR it is first necessary to reverse transcribe RNA into DNA, using enzymes such as reverse transcriptase, and then through the use of conventional PCR techniques amplify the DNA. In most instances PC techniques, while useful, will not demonstrate integrity of the RNA product. Further information about the nature of the RNA product may be obtained by Northern blotting. This technique will demonstrate the presence of an RNA species and give information about the integrity of that RNA. The presence or absence of an RNA species also can be determined using dot or slot blot Northern hybridizations. These techniques are modifications of Northern blotting and will only demonstrate the presence or absence of an RNA species. It is further contemplated that TAQMAN® technology (Applied Biosystems, Foster City, Calif.) may be used to quantitate both DNA and RNA in a transgenic cell.

[0633] 2. Gene Expression

[0634] While Southern blotting and PCR may be used to detect the gene(s) in question, they do not provide information as to whether the gene is being expressed. Expression may be evaluated by specifically identifying the protein products of the introduced genes or evaluating the phenotypic changes brought about by their expression.

[0635] Assays for the production and identification of specific proteins may make use of physical-chemical, structural, functional, or other properties of the proteins. Unique physical-chemical or structural properties allow the proteins to be separated and identified by electrophoretic procedures, such as native or denaturing gel electrophoresis or isoelectric focusing, or by chromatographic techniques such as ion exchange or gel exclusion chromatography. The unique structures of individual proteins offer opportunities for use of specific antibodies to detect their presence in formats such as an ELISA assay. Combinations of approaches may be employed with even greater specificity such as Western blotting in which antibodies are used to locate individual gene products that have been separated by electrophoretic techniques. Additional techniques may be employed to absolutely confirm the identity of the product of interest such as evaluation by amino acid sequencing following purification. Although these are among the most commonly employed, other procedures may be additionally used.

[0636] Assay procedures also may be used to identify the expression of proteins by their functionality, especially the ability of enzymes to catalyze specific chemical reactions involving specific substrates and products. These reactions may be followed by providing and quantifying the loss of substrates or the generation of products of the reactions by physical or chemical procedures. Examples are as varied as the enzyme to be analyzed and may include assays for PAT enzymatic activity by following production of radiolabeled acetylated phosphinothricin from phosphinothricin and ¹⁴C-acetyl CoA or for anthranilate synthase activity by following an increase in fluorescence as anthranilate is produced, to name two.

[0637] Very frequently the expression of a gene product is determined by evaluating the phenotypic results of its expression. These assays also may take many forms, including but not limited to, analyzing changes in the chemical composition, morphology, or physiological properties of the plant. Chemical composition may be altered by expression of genes encoding enzymes or storage proteins which change amino acid composition and may be detected by amino acid analysis, or by enzymes which change starch quantity which may be analyzed by near infrared reflectance spectrometry. Morphological changes may include greater stature or thicker stalks. Most often changes in response of plants or plant parts to imposed treatments are evaluated under carefully controlled conditions termed bioassays.

[0638] I. Event Specific Transgene Assays

[0639] Southern blotting, PCR and RT-PCR techniques can be used to identify the presence or absence of a given transgene but, depending upon experimental design, may not specifically and uniquely identify identical or related transgene constructs located at different insertion points within the recipient genome. To more precisely characterize the presence of transgenic material in a transformed plant, one skilled in the art could identify the point of insertion of the transgene and, using the sequence of the recipient genome flanking the transgene, develop an assay that specifically and uniquely identifies a particular insertion event. Many methods can be used to determine the point of insertion such as, but not limited to, Genome Walker™ technology (CLONTECH, Palo Alto, Calif.), Vectorette™ technology (Sigma, St. Louis, Mo.), restriction site oligonucleotide PCR (Sarkar et al., 1993; Weber et al., 1998), uneven PCR (Chen and Wu, 1997) and generation of genomic DNA clones containing the transgene of interest in a vector such as, but not limited to, lambda phage.

[0640] Once the sequence of the genomic DNA directly adjacent to the transgenic insert on either or both sides has been determined, one skilled in the art can develop an assay to specifically and uniquely identify the insertion event. For example, two oligonucleotide primers can be designed, one wholly contained within the transgene and one wholly contained within the flanking sequence, which can be used together with the PCR technique to generate a PCR product unique to the inserted transgene. In one embodiment, the two oligonucleotide primers for use in PCR could be designed such that one primer is complementary to sequences in both the transgene and adjacent flanking sequence such that the primer spans the junction of the insertion site while the second primer could be homologous to sequences contained wholly within the transgene. In another embodiment, the two oligonucleotide primers for use in PCR could be designed such that one primer is complementary to sequences in both the transgene and adjacent flanking sequence such that the primer spans the junction of the insertion site while the second primer could be homologous to sequences contained wholly within the genomic sequence adjacent to the insertion site. Confirmation of the PCR reaction may be monitored by, but not limited to, size analysis on gel electrophoresis, sequence analysis, hybridization of the PCR product to a specific radiolabeled DNA or RNA probe or to a molecular beacon (Tyagi and Kramer, 1996), or use of the primers in conjugation with a TAQMAN™ probe and technology (Applied Biosystems, Foster City, Calif.)

[0641] J. Site Specific Integration or Excision of Transgenes

[0642] It is specifically contemplated by the inventors that one could employ techniques for the site-specific integration or excision of transformation constructs prepared in accordance with the instant invention. An advantage of site-specific integration or excision is that it can be used to overcome problems associated with conventional transformation techniques, in which transformation constructs typically randomly integrate into a host genome and multiple copies of a construct may integrate. This random insertion of introduced DNA into the genome of host cells can be detrimental to the cell if the foreign DNA inserts into an essential gene. In addition, the expression of a transgene may be influenced by “position effects” caused by the surrounding genomic DNA. Further, because of difficulties associated with plants possessing multiple transgene copies, including gene silencing, recombination and unpredictable inheritance, it is typically desirable to control the copy number of the inserted DNA, often only desiring the insertion of a single copy of the DNA sequence.

[0643] Site-specific integration can be achieved in plants by means of homologous recombination (see, for example, U.S. Pat. No. 5,527,695, specifically incorporated herein by reference in its entirety). Homologous recombination is a reaction between any pair of DNA sequences having a similar sequence of nucleotides, where the two sequences interact (recombine) to form a new recombinant DNA species. The frequency of homologous recombination increases as the length of the shared nucleotide DNA sequences increases, and is higher with linearized plasmid molecules than with circularized plasmid molecules. Homologous recombination can occur between two DNA sequences that are less than identical, but the recombination frequency declines as the divergence between the two sequences increases.

[0644] Introduced DNA sequences can be targeted via homologous recombination by linking a DNA molecule of interest to sequences sharing homology with endogenous sequences of the host cell. Once the DNA enters the cell, the two homologous sequences can interact to insert the introduced DNA at the site where the homologous genomic DNA sequences were located. Therefore, the choice of homologous sequences contained on the introduced DNA will determine the site where the introduced DNA is integrated via homologous recombination. For example, if the DNA sequence of interest is linked to DNA sequences sharing homology to a single copy gene of a host plant cell, the DNA sequence of interest will be inserted via homologous recombination at only that single specific site. However, if the DNA sequence of interest is linked to DNA sequences sharing homology to a multicopy gene of the host eukaryotic cell, then the DNA sequence of interest can be inserted via homologous recombination at each of the specific sites where a copy of the gene is located.

[0645] DNA can be inserted into the host genome by a homologous recombination reaction involving either a single reciprocal recombination (resulting in the insertion of the entire length of the introduced DNA) or through a double reciprocal recombination (resulting in the insertion of only the DNA located between the two recombination events). For example, if one wishes to insert a foreign gene into the genomic site where a selected gene is located, the introduced DNA should contain sequences homologous to the selected gene. A single homologous recombination event would then result in the entire introduced DNA sequence being inserted into the selected gene. Alternatively, a double recombination event can be achieved by flanking each end of the DNA sequence of interest (the sequence intended to be inserted into the genome) with DNA sequences homologous to the selected gene. A homologous recombination event involving each of the homologous flanking regions will result in the insertion of the foreign DNA. Thus only those DNA sequences located between the two regions sharing genomic homology become integrated into the genome.

[0646] Although introduced sequences can be targeted for insertion into a specific genomic site via homologous recombination, in higher eukaryotes homologous recombination is a relatively rare event compared to random insertion events. Thus random integration of transgenes is more common in plants. To maintain control over the copy number and the location of the inserted DNA, randomly inserted DNA sequences can be removed. One manner of removing these random insertions is to utilize a site-specific recombinase system (U.S. Pat. No. 5,527,695).

[0647] A number of different site specific recombinase systems could be employed in accordance with the instant invention, including, but not limited to, the Cre/lox system of bacteriophage P1 (U.S. Pat. No. 5,658,772, specifically incorporated herein by reference in its entirety), the FLP/FRT system of yeast (Golic and Lindquist, 1989), the Gin recombinase of phage Mu (Maeser et al, 1991), the Pin recombinase of E. coli (Enomoto et al., 1983), and the R/RS system of the pSR1 plasmid (Araki et al., 1992). The bacteriophage P1 Cre/lox and the yeast FLP/FRT systems constitute two particularly useful systems for site specific integration or excision of transgenes. In these systems; a recombinase (Cre or FLP) will interact specifically with its respective site-specific recombination sequence (lox or FRT, respectively) to invert or excise the intervening sequences. The sequence for each of these two systems is relatively short (34 bp for lox and 47 bp for FRT) and therefore, convenient for use with transformation vectors.

[0648] The FLP/FRT recombinase system has been demonstrated to function efficiently in plant cells. Experiments on the performance of the FLP/FRT system in both maize and rice protoplasts indicate that FRT site structure, and amount of the FLP protein present, affects excision activity. In general, short incomplete FRT sites leads to higher accumulation of excision products than the complete full-length FRT sites. The systems can catalyze both intra- and intermolecular reactions in maize protoplasts, indicating its utility for DNA excision as well as integration reactions. The recombination reaction is reversible and this reversibility can compromise the efficiency of the reaction in each direction. Altering the structure of the site-specific recombination sequences is one approach to remedying this situation. The site-specific recombination sequence can be mutated in a manner that the product of the recombination reaction is no longer recognized as a substrate for the reverse reaction, thereby stabilizing the integration or excision event.

[0649] In the Cre-lox system, discovered in bacteriophage PI, recombination between lox sites occurs in the presence of the Cre recombinase (see, e.g., U.S. Pat. No. 5,658,772, specifically incorporated herein by reference in its entirety). This system has been utilized to excise a gene located between two lox sites which had been introduced into a yeast genome (Sauer, 1987). Cre was expressed from an inducible yeast GAL1 promoter and this Cre gene was located on an autonomously replicating yeast vector.

[0650] Since the lox site is an asymmetrical nucleotide sequence, lox sites on the same DNA molecule can have the same or opposite orientation with respect to each other. Recombination between lox sites in the same orientation results in a deletion of the DNA segment located between the two lox sites and a connection between the resulting ends of the original DNA molecule. The deleted DNA segment forms a circular molecule of DNA. The original DNA molecule and the resulting circular molecule each contain a single lox site. Recombination between lox sites in opposite orientations on the same DNA molecule result in an inversion of the nucleotide sequence of the DNA segment located between the two lox sites. In addition, reciprocal exchange of DNA segments proximate to lox sites located on two different DNA molecules can occur. All of these recombination events are catalyzed by the product of the Cre coding region.

[0651] K. Deletion of Sequences Located Within the Transgenic Insert

[0652] During the transformation process it is often necessary to include ancillary sequences, such as selectable marker or reporter genes, for tracking the presence or absence of a desired trait gene transformed into the plant on the DNA construct. Such ancillary sequences often do not contribute to the desired trait or characteristic conferred by the phenotypic trait gene. Homologous recombination is a method by which introduced sequences may be selectively deleted in transgenic plants.

[0653] It is known that homologous recombination results in genetic rearrangements of transgenes in plants. Repeated DNA sequences have been shown to lead to deletion of a flanked sequence in various dicot species, e.g. Arabidopsis thaliana (Swoboda et al., 1994; Jelesko et al., 1999), Brassica napus (Gal et al., 1991; Swoboda et al, 1993) and Nicotiana tabacum (Peterhans et al, 1990; Zubko et al., 2000). One of the most widely held models for homologous recombination is the double-strand break repair (DSBR) model (Szostak et al., 1983).

[0654] Deletion of sequences by homologous recombination relies upon directly repeated DNA sequences positioned about the region to be excised in which the repeated DNA sequences direct excision utilizing native cellular recombination mechanisms. The first fertile transgenic plants are crossed to produce either hybrid or inbred progeny plants, and from those progeny plants, one or more second fertile transgenic plants are selected which contain a second DNA sequence that has been altered by recombination, preferably resulting in the deletion of the ancillary sequence. The first fertile plant can be either hemizygous or homozygous for the DNA sequence containing the directly repeated DNA which will drive the recombination event.

[0655] The directly repeated sequences are located 5′ and 3′ to the target sequence in the transgene. As a result of the recombination event, the transgene target sequence may be deleted, amplified or otherwise modified within the plant genome. In the preferred embodiment, a deletion of the target sequence flanked by the directly repeated sequence will result.

[0656] Alternatively, directly repeated DNA sequence mediated alterations of transgene insertions may be produced in somatic cells. Preferably, recombination occurs in a cultured cell, e.g., callus, and may be selected based on deletion of a negative selectable marker gene, e.g., the periA gene isolated from Burkholderia caryolphilli which encodes a phosphonate ester hydrolase enzyme that catalyzes the hydrolysis of glyceryl glyphosate to the toxic compound glyphosate (U.S. Pat. No. 5,254,801).

[0657] L. Methods of Evaluating Phenotype

[0658] Expression, and in some cases suppression, of the various genes embodied by heterologous DNA used in the present invention leads to improved phenotypes in transformed plants. Phenotypic data is collected during the transformation process in callus as well as during plant regeneration, as well as in plant tissue. Phenotypic data can also be collected in transformed callus relating to the morphological appearance as well as growth of the callus, e.g., shooty, rooty, starchy, mucoid, non-embryogenic, increased growth rate, decreased growth rate, dead. It is expected that one of skill in the art may recognize other phenotypic characteristics in transformed callus and plants and select transformed plants having enhanced traits with minimal drag on other key traits, e.g. yield. Phenotypic data is also collected during the process of plant regeneration as well as in regenerated plants transferred to soil. It is expected that one of skill in the art may recognize other phenotypic characteristics in transformed plants.

[0659] Although a wide variety of phenotypes are monitored during the process of plant breeding and testing in both inbred and hybrid plants. For example, in R0 plants (plants directly regenerated from callus) and R1 plants (the direct progeny of R0 plants), plant characteristic phenotypes and plant seed characteristic phenotypes can be observed. In R2 and R3 plants, days to pollen shed, days to silking, and plant type can be observed. Metabolite profiling of R2 plants can be conducted. A variety of phenotypes can also be assayed in hybrids of transgenic maize of this invention. For example, yield, moisture, test weight, nutritional composition, chlorophyll content, leaf temperature, stand, seedling vigor, plant height, leaf number, tillering, brace roots, stay green, stalk lodging, root lodging, plant health, barreness/prolificacy, green snap, pest resistance (including diseases, viruses and insects) and metabolic profiles can be recorded. In addition, phenotypic characteristics of grain harvested from hybrids will be recorded, including number of kernels per row on the ear, number of rows of kernels on the ear, kernel abortion, kernel weight, kernel size, kernel density and physical grain quality. Furthermore, characteristics such as photosynthesis, leaf area, husk structure, kernel dry down rate and internode length may be measured in hybrids or inbreds. It is expected that transcriptional profiling may be performed on transgenic plants expressing genes of the present invention.

[0660] In a further embodiment of the method of the invention, the transformation and selection steps may be followed by conventional plant improvement techniques thus leading to seeds having an even further improvement in the enhanced phenotype. In still another embodiment the seeds of the invention may be subjected to one or more further transformation treatments.

[0661] The maize plants with enhanced phenotype may be used in breeding programs for the development of elite maize lines or hybrids, which programs are aimed at the production of varieties meeting the requirements of farming practice regarding yield, disease resistance and other agronomically important traits in major maize growing areas in the world. Seeds resulting from these programs may be used in the growing of commercial maize crops.

[0662] To confirm hybrid yield in transgenic plants expressing genes of the present invention, it may be desirable that hybrids be tested over multiple years at multiple locations in a geographical location where maize is conventionally grown, e.g. in Iowa, Illinois or other locations in the Midwestern United States, under “normal” field conditions as well as under stress conditions, e.g. under drought or population density stress. One of skill in the art knows how to design a yield trial such that a statistically significant yield difference can be detected between two hybrids at the desired rate of precision.

[0663] M. Breeding Plants of the Invention

[0664] In addition to direct transformation of a particular plant genotype with a construct prepared according to the current invention, transgenic plants may be made by crossing a plant having a construct of the invention to a second plant lacking the construct. For example, a selected coding region operably linked to a promoter can be introduced into a particular plant variety by crossing, without the need for ever directly transforming a plant of that given variety. Therefore, the current invention not only encompasses a plant directly regenerated from cells which have been transformed in accordance with the current invention, but also the progeny of such plants. As used herein the term “progeny” denotes the offspring of any generation of a parent plant prepared in accordance with the instant invention, wherein the progeny comprises a construct prepared in accordance with the invention. “Crossing” a plant to provide a plant line having one or more added transgenes relative to a starting plant line, as disclosed herein, is defined as the techniques that result in a transgene of the invention being introduced into a plant line by crossing a starting line with a donor plant line that comprises a transgene of the invention.

[0665] Backcrossing can be used to improve a starting plant. Backcrossing transfers a specific desirable trait from one source to an inbred or other plant that lacks that trait. This can be accomplished, for example, by first crossing a superior inbred (A) (recurrent parent) to a donor inbred (non-recurrent parent), which carries the appropriate gene(s) for the trait in question, for example, a construct prepared in accordance with the current invention. The progeny of this cross first are selected in the resultant progeny for the desired trait to be transferred from the non-recurrent parent, then the selected progeny are mated back to the superior recurrent parent (A). After five or more backcross generations with selection for the desired trait, the progeny are hemizygous for loci controlling the characteristic being transferred, but are like the superior parent for most or almost all other genes. The last backcross generation would be selfed to give progeny which are pure breeding for the gene(s) being transferred, i.e. one or more transformation events.

[0666] Therefore, through a series a breeding manipulations, a selected transgene may be moved from one line into an entirely different line without the need for further recombinant manipulation. Transgenes are valuable in that they typically behave genetically as any other gene and can be manipulated by breeding techniques in a manner identical to any other corn gene. Therefore, one may produce inbred plants which are true breeding for one or more transgenes. By crossing different inbred plants, one may produce a large number of different hybrids with different combinations of transgenes. In this way, plants may be produced which have the desirable agronomic properties frequently associated with hybrids (“hybrid vigor”), as well as the desirable characteristics imparted by one or more transgene(s).

[0667] Introgression of a DNA element into a plant genotype is defined as the result of the process of backcross conversion. A plant genotype into which a DNA sequence has been introgressed may be referred to as a backcross converted genotype, line, inbred, or hybrid. Similarly a plant genotype lacking the desired DNA sequence may be referred to as an unconverted genotype, line, inbred, or hybrid.

[0668] It is desirable to introgress the genes of the present invention into maize hybrids for characterization of the phenotype conferred by each gene in a transformed plant. The host genotype into which the transgene was introduced, preferably LH59, is an elite inbred and therefore only limited breeding is necessary in order to produce high yielding maize hybrids. The transformed plant, regenerated from callus is crossed, to the same genotype, e.g., LH59. The progeny are self pollinated twice and plants homozygous for the transgene are identified. Homozygous transgenic plants are crossed to a testcross parent in order to produce hybrids. The test cross parent is an inbred belonging to a heterotic group which is different from that of the transgenic parent and for which it is known that high yielding hybrids can be generated, for example hybrids are produced from crosses of LH59 to either LH195 or LH200.

[0669] N. Methods of Evaluating Phenotype

[0670] Expression of the genes of the present invention leads to various phenotypes as disclosed herein in transformed cells and plants. Phenotypic data is collected during the transformation process in callus as well as during plant regeneration, as well as in plants and progeny. Phenotypic data is collected in transformed callus relating to the morphological appearance as well as growth of the callus, e.g., shooty, rooty, starchy, mucoid, non-embryogenic, increased growth rate, decreased growth rate, dead. It is expected that one of skill in the art may recognize other phenotypic characteristics in transformed callus.

[0671] Phenotypic data is also collected during the process of plant regeneration as well as in -regenerated plants transferred to soil. Phentoypic data includes characteristics such as normal plants, bushy plants, narrow leaves, striped leaves, knotted phenotype [REF}, chlorosis, albino, anthocyanin production, buggy whipped (a phenomenon known to the art in which the most recently emerged leaves are elongated and wrap around each other), or altered tassels, ears or roots. It is expected that one of skill in the art may recognize other phenotypic characteristics in transformed plants.

[0672] A wide variety of phenotypes are monitored during the process of plant breeding and testing in both inbred and hybrid plants. For example, in R0 and R1 plants (plants directly regenerated from callus and the direct progeny of those plants), plant type (general morphological characteristics such as those described above for plantlets) and nutritional composition of grain produced by the plants are recorded. Nutritional composition analysis may include amino acid composition, amount of protein, starch and oil, characteristics of protein, starch and oil, fiber, ash, mineral content may all be measured. It is expected that one of skill in the art may include analyses of other components of the grain. In R2 and R3 plants, days to pollen shed, days to silking, and plant type are observed. Furthermore, metabolite profiling of R2 plants is conducted. Using methods available to those of skill in the art, 50 to 100 or more metabolites may be analyzed in a plant, thereby establishing a metabolic fingerprint of the plant. In addition in R3 plants, leaf extension rate is measured under field conditions. A variety of phenotypes will be assayed in hybrids comprising a transgene of the present invention. For example, yield, moisture, test weight, nutritional composition, chlorophyll content, leaf temperature, stand, seedling vigor, plant height, leaf number, tillering, brace roots, stay green, stalk lodging, root lodging, plant health, barreness/prolificacy, green snap, pest resistance (including diseases, viruses and insects) and metabolic profiles will be recorded. In addition, phenotypic characteristics of grain harvested from hybrids will be recorded, including number of kernels per row on the ear, number of rows of kernels on the ear, kernel abortion, kernel weight, kernel size, kernel density and physical grain quality. Furthermore, characteristics such as photosynthesis, leaf area, husk structure, kernel dry down rate and internode length may be measured in hybrids or inbreds. It is expected that transcriptional profiling may be performed on transgenic plants expressing genes of the present invention.

[0673] In order to determine hybrid yield in transgenic plants expressing genes of the present invention, it is recognized that hybrids must be tested at multiple locations in a geographical location where maize is conventionally grown, e.g., Iowa, Illinois or other locations in the Midwestern United States. It is expected that more than one year of yield testing is desirable in order to identify transgenes which contribute to improvement of a maize hybrid. Therefore, transgenic hybrids will be evaluated in a first year at a sufficient number of locations to identify at least an approximately 10% yield difference from a non-transgenic hybrid counterpart. A second year of yield tests is conducted at sufficient locations and with suffucient repetitions to be able to idenify a 4% yield difference between two hybrids. Furthermore, in the second year of yield tests, hybrids will be evaluated under normal field conditions as well as under stress conditions, e.g., under conditions of water or population density stress. One of skill in the art knows how to design a yield trial such that a statistically significant yield difference can be detected between two hybrids at the desired rate of precision.

[0674] O. Additional Definitions

[0675] As used herein genetic transformation: means a process of introducing a DNA sequence or construct (e.g., a vector or expression cassette) into a cell or protoplast in which that exogenous DNA is incorporated into a chromosome or is capable of autonomous replication.

[0676] As used herein, exogenous gene means a gene which is not normally present in a given host genome in the exogenous gene's present form. In this respect, the gene itself may be native to the host genome, however, the exogenous gene will comprise the native gene altered by the addition or deletion of one or more different regulatory elements.

[0677] As used herein, expression means the combination of intracellular processes, including transcription and translation undergone by a coding DNA molecule such as a structural gene to produce a polypeptide.

[0678] As used herein, expression cassette means a chimeric DNA molecule which is designed for introduction into a host genome by genetic transformation. Preferred expression cassettes will comprise all of the genetic elements necessary to direct the expression of a selected gene.

[0679] As used herein, expression vector means a vector comprising at least one expression cassette.

[0680] As used herein, obtaining, when used in conjunction with a transgenic plant cell or transgenic plant, means either transforming a non-transgenic plant cell or plant to create the transgenic plant cell or plant, or planting transgenic plant seed to produce the transgenic plant cell or plant.

[0681] As used herein, progeny means any subsequent generation, including the seeds and plants therefrom, which is derived from a particular parental plant or set of parental plants.

[0682] As used herein, promoter means a recognition site on a DNA sequence or group of DNA sequences that provides an expression control element for a structural gene and to which RNA polymerase specifically binds and initiates RNA synthesis (transcription) of that gene.

[0683] As used herein, R₀ transgenic plant means a plant which has been directly transformed with a selected DNA or has been regenerated from a cell or cell cluster which has been transformed with a selected DNA.

[0684] As used herein, regeneration means the process of growing a plant from a plant cell (e.g, plant protoplast, callus or explant).

[0685] As used herein, selected DNA means, a DNA segment which one desires to introduce into a plant genome by genetic transformation.

[0686] As used herein, selected gene means a gene which one desires to have expressed in a transgenic plant, plant cell or plant part. A selected gene may be native or foreign to a host genome, but where the selected gene is present in the host genome, will include one or more regulatory or functional elements which differ from native copies of the gene.

[0687] As used herein, transformation construct means a chimeric DNA molecule which is designed for introduction into a host genome by genetic transformation. Preferred transformation constructs will comprise all of the genetic elements necessary to direct the expression of one or more exogenous genes. In particular embodiments of the instant invention, it may be desirable to introduce a transformation construct into a host cell in the form of an expression cassette.

[0688] As used herein, transformed cell means a cell the DNA complement of which has been altered by the introduction of an exogenous DNA molecule into that cell.

[0689] As used herein, transgene means a segment of DNA which has been incorporated into a host genome or is capable of autonomous replication in a host cell and is capable of causing the expression of one or more cellular products. Exemplary transgenes will provide the host cell, or plants regenerated therefrom, with a novel phenotype relative to the corresponding non-transformed cell or plant. Transgenes may be directly introduced into a plant by genetic transformation, or may be inherited from a plant of any previous generation which was transformed with the DNA segment.

[0690] As used herein, transgenic plant means a plant or progeny plant of any subsequent generation derived therefrom, wherein the DNA of the plant or progeny thereof contains an introduced exogenous DNA segment not originally present in a non-transgenic plant of the same strain. The transgenic plant may additionally contain sequences which are native to the plant being transformed, but wherein the “exogenous” gene has been altered in order to alter the level or pattern of expression of the gene.

[0691] As used herein, transit peptide means a polypeptide sequence which is capable of directing a polypeptide to a particular organelle or other location within a cell.

[0692] As used herein, vector means a DNA molecule capable of replication in a host cell and/or to which another DNA segment can be operatively linked so as to bring about replication of the attached segment. A plasmid is an exemplary vector.

[0693] As used herein, purified refers to a nucleic acid molecule or polypeptide separated from substantially all other molecules normally associated with it in its native state. More preferably, a substantially purified molecule is the predominant species present in a preparation. A substantially purified molecule may be greater than 60% free, preferably 75% free, more preferably 90% free, and most preferably 95% free from the other molecules (exclusive of solvent) present in the natural mixture. The terms “isolated and purified” and “substantially purified” are not intended to encompass molecules present in their native state.

[0694] The molecules and organisms of the invention may also be recombinant. As used herein, the term recombinant describes (a) nucleic acid molecules that are constructed or modified outside of cells and that can replicate or function in a living cell, (b) molecules that result from the transcription, replication or translation of recombinant nucleic acid molecules, or (c) organisms that contain recombinant nucleic acid molecules or are modified using recombinant nucleic acid molecules.

[0695] It is understood that the molecules of the invention may be labeled with reagents that facilitate detection of the agent (e.g., fluorescent labels (Prober, et al., Science 238:336-340 (1987); Albarella et al., EP 144914, chemical labels (Sheldon et al., U.S. Pat. No. 4,582,789; Albarella et al., U.S. Pat. No. 4,563,417, modified bases (Miyoshi et al., EP 119448.

[0696] As used herein reduced protein activity and enhanced protein activity in a recombinant cell or organism is determined by reference to a wild type cell or organism and can be determined by direct or indirect measurement. Direct measurement of protein activity might include an analytical assay for the protein, per se, or enzymatic product of protein activity. Indirect assay might include measurement of a property affected by the protein. Enhanced protein activity can be achieved by linking a constitutive promoter to the gene encoding the protein. Reduced protein activity can be achieved by a variety of mechanisms including antisense, mutation or knockout. Antisense RNA will reduce the level of protein expressed and the activity will be reduced as compared to wild type expression levels. A mutation in the gene coding for a protein may not decrease the protein expression, but instead interfere with the protein's function to cause reduced protein activity. A knockout can be achieved by homologous recombination with less than the whole gene.

### EXAMPLES

[0697] Using the methods disclosed herein any one of the coding sequences listed in SEQ ID NO: 1-982 is inserted into a plant expression vector, i.e., operably linked to a promoter and other regulatory elements as described previously herein. Genes are inserted in the sense or antisense orientation as appropriate to confer the expected phenotype. A constituitive promoter, such as the rice actin1 promoter is preferably linked to the coding sequence. However, in certain instances use of a tissue specific promoter, e.g., seed specific, may be desirable.

[0698] The methods described below are illustrative of methods to express a DNA sequence of interest in a transgenic plant. However, those of skill in the art will know other methods of achieving similar results.

### Example 1

[0699] Construction of the Destination Vector

[0700] A GATEWAY™ Destination (Invitrogen Life Technologies, Carlsbad, Calif.) plant expression vector was constructed (pMON65154, FIG. 1) using methods known to those of skill in the art. The elements of the expression vector are summarized in 7. The backbone of the plasmid pMON65154 comprising the bacterial replication functions and an ampicillin resistance gene expressed in E. coli were derived from the plasmid pSK-. The plant expression elements in pMON64154 are available to those of skill in the art and references are provided for each element in Table 2. All references in Table 2 to location refer to base pair coordinates for each element on the plasmid-map disclosed in FIG. 1. Generally, pMON65 154 comprises a selectable marker expression cassettte comprising a Cauliflower Mosaic Virus 35S promoter operablly linked to a gene encoding neomycin phosphotransferase II (nptII). The 3′ region of the selectable marker expression cassette comprises the 3′ region of the Agrobacterium tumefaciense nopaline synthase gene (nos) followed 3′ by the 3′ region of the potato proteinase inhibitor II (pinII) gene. The plasmid pMON 65154 further comprises a plant expression cassette into which a gene of interest may be inserted using GATEWAY™ cloning methods. The GATEWAY™ cloning cassette is flanked 5′ by a rice actin 1 promoter, exon and intron and flanked 3′ by the 3′ region of the potato pinII gene. Using GATEWAY™ methods, the cloning cassette was replaced by a gene of interest. The vector pMON65154 and derivaties thereof comprising a gene of interest, were particularly useful in methods of plant transformation via direct DNA delivery, such as microprjectile bombardment. One of skill in the art could construct an expression vector with similar features using methods known in the art. Furthermore, one of skill in the art would appreciate that other promoters and 3′ regions would be useful for expression of a gene of interest and other selectable markers may be used.

TABLE 2
Elements of Plasmid pMON65154

| CASSETTE | FUNCTION | ELEMENT | LOCATION | REFERENCE |
|---|---|---|---|---|
| Plant gene of | Promoter | Rice actin 1 | 1796-2638 | Wang et al., 1992 |
| interest | | | | |
| expression | | | | |
| | Enhancer | Rice actin 1 | 2639-3170 | Wang et al., 1992 |
| | | exon 1, intron | | |
| | | 1 | | |
| GATEWAY ™ | Recombination | AttR1 | 3188-3312 | GATEWAY ™ Cloning |
| cloning | | | | Technology Instruction |
| | | | | Manual (Invitrogen |
| | | | | Life Technologies, |
| | | | | Carlsbad, CA) |
| | Bacterial | CmR gene | 3421-4080 | GATEWAY ™ Cloning |
| | chloramphenical | | | Technology Instruction |
| | resistance gene | | | Manual (Invitrogen |
| | | | | Life Technologies, |
| | | | | Carlsbad, CA) |
| | Bacterial negative | ccdA, ccdB | 4200-4727 | GATEWAY ™ Cloning |
| | selectable markers | genes | | Technology Instruction |
| | | | | Manual (Invitrogen |
| | | | | Life Technologies, |
| | | | | Carlsbad, CA) |
| | GATEWAY ™ | attR2 | 4768-4892 | GATEWAY ™ Cloning |
| | recombination site | | | Technology Instruction |
| | | | | Manual (Invitrogen |
| | | | | Life Technologies, |
| | | | | Carlsbad, CA) |
| Plant gene of | 3′ region | Potato pinII | 4907-5846 | An et al., 1989 |
| interest | | | | |
| expression | | | | |
| cassette | | | | |
| Plant selectable | Promoter | Cauliflower | 5895-6218 | Odell et al., 1985 |
| marker gene | | Mosaic Virus | | |
| expression | | 35S | | |
| cassette | | | | |
| | Selectable marker | nptII | 6252-7046 | Beck et al., 1982 |
| | gene | | | |
| | 3′ region | nos | 7072-7327 | Bevan et al., 1983 |
| | 3′ region | pinII | 7339-8085 | An et al., 1989 |
| Maintenance in | Origin of | ColE1 | 858-1267 | Oka et al, 1979 |
| E. coli | replication | | | |
| Maintenance in | Origin of | F1 | 8273-3673 | Ravetch et al., 1977 |
| E. coli | replication | | | |
| Maintenance in | Ampicillin | Bla | 8909-551 | Heffron et al., 1979 |
| E. coli | resistance | | | |

[0701] A separate plasmid vector (pMON72472, FIG. 2) was constructed for use in Agrobacterium mediated methods of plant transformation. The plasmid pRG76 comprises the gene of interest plant expression, GATEWAY™ cloning, and plant selectable marker expression cassettes present in pMON65154. In addition left and right T-DNA border sequences from Agrobacterium were added to the plasmid. The right border sequence is located 5′ to the rice actin 1 promoter and the left border sequence is located 3′ to the pinII 3′ sequence situated 3′ to the nptII gene. Furthermore the pSK-backbone of pMON65164 was replaced by a plasmid backbone to facilitate replication of the plasmid in both E. coli and Agrobacterium tumefaciens. The backbone comprises an oriV wide host range origin of DNA replication functional in Agrobacterium, the rop sequence, a pBR322 origin of DNA replication functional in E. coli and a spectinomycin/stretptomycin resistance gene for selection for the presence of the plasmid in both E. coli and Agrobacterium.

[0702] The elements present in plasmid vector pRG81 are described in Table 3.

TABLE 3
Genetic Elements of Plasmid Vector pRG81

| CASSETTE | FUNCTION | ELEMENT | LOCATION | REFERENCE |
|---|---|---|---|---|
| Plant gene of | Promoter | Rice actin 1 | 5610-6452 | Wang et al., 1992 |
| interest | | | | |
| expression | | | | |
| | Enhancer | Rice actin 1 | 6453-6984 | Wang et al., 1992 |
| | | exon 1, intron 1 | | |
| GATEWAY ™ | Recombination | AttR1 | 7002-7126 | GATEWAY ™ Cloning |
| cloning | | | | Technology Instruction |
| | | | | Manual (Invitrogen |
| | | | | Life Technologies, |
| | | | | Carlsbad, CA) |
| | Bacterial | CmR gene | 7235-7894 | GATEWAY ™ Cloning |
| | chloramphenical | | | Technology Instruction |
| | resistance gene | | | Manual (Invitrogen |
| | | | | Life Technologies, |
| | | | | Carlsbad, CA) |
| | Bacterial negative | ccdA, ccdB | 8014-8541 | GATEWAY ™ Cloning |
| | selectable | genes | | Technology Instruction |
| | markers | | | Manual (Invitrogen |
| | | | | Life Technologies, |
| | | | | Carlsbad, CA) |
| | GATEWAY ™ | attR2 | 8582-8706 | GATEWAY ™ Cloning |
| | recombination | | | Technology Instruction |
| | site | | | Manual (Invitrogen |
| | | | | Life Technologies, |
| | | | | Carlsbad, CA) |
| Plant gene of | 3′ region | Potato pinII | 8721-9660 | An et al., 1989 |
| interest | | | | |
| expression | | | | |
| cassette | | | | |
| Plant selectable | Promoter | Cauliflower | 1-324 | Odell et al., 1985 |
| marker gene | | Mosaic Virus | | |
| expression | | 35S | | |
| cassette | | | | |
| | Selectable marker | nptII | 358-1152 | Beck et al., 1982 |
| | gene | | | |
| | 3′ region | nos | 1178-1433 | Bevan et al., 1983 |
| | 3′ region | pinII | 1445-2191 | An et al., 1989 |
| Agrobacterium | DNA transfer | Left border | 2493-2516 | Zambryski et al., 1982; |
| mediated | | | | GenBank Accession |
| transformation | | | | AJ237588 |
| Maintenance of | Origin of | Ori-V | 2755-3147 | Honda et al., 1988 |
| plasmid in E. | replication | | | |
| coli or | | | | |
| Agrobacterium | | | | |
| Maintenance of | Origin of | ColE1 | 3545-4199 | Oka et al., 1972 |
| plasmid in E. | replication | | | |
| coli | | | | |
| Maintenance of | Spectinomycin/sts | Spc/Str | 4242-5030 | Fling et al., 1985 |
| plasmid in E. | treptomycin | | | |
| coli or | resistance | | | |
| Agrobacterium | | | | |
| Agrobacterium | DNA transfer | Right border | 5514-5538 | Zambryski et al., 1982; |
| mediated | | | | GenBank Accession |
| transformation | | | | AJ237588 |

### Example 2

[0703] Isolation of Coding Sequences

[0704] Coding sequences were amplified by PCR prior to insertion in a GATEWAY™ Destination plant expression vector such as pMON65154. All coding sequences were available as either a cloned full length sequence or as DNA sequence information which allowed amplification of the desired sequence from a cDNA library. Primers for PCR amplification were designed at or near the start and stop codons of the coding sequence, in order to eliminate most of the 5′ and 3′ untranslated regions. PCR products were tailed with attB1 and attB2 sequences in order to allow cloning by recombination into GATEWAY™ vectors (Invitrogen Life Technologies, Carlsbad, Calif.).

[0705] Two methods were used to produce attB flanked PCR amplified sequences of interest. Both methods are described in detail in the GATEWAY™ Cloning Technology Instruction Manual (Invitrogen Life Technologies, Carlsbad, Calif.). In the first method, a single primer set comprising attB and template specific sequences was used. The primer sequences are as follows:

attB1 forward primer:
5′ GGG CAC TTT GTA CAA GAA AGC TGG GTN template specific sequence 3′
attB2 reverse primer
5′ GGGG CAC TTT GTA CAA GAA AGC TGG GTN template specific sequence 3′

[0706] Examples of various PCR primers sets for use in amplification of attB flanked PCR amplifications using a single primer set are disclosed herein as SEQ ID NO: X-Y. Following amplification of attB flanked desired sequences, the PCR product was purified by [INSERT METHOD] and used to produce a GATEWAY™ Entry Vector as described in Example 3 herein.

[0707] Alternatively, attB adapter PCR was used to prepare attB flanked PCR products. attB1 adapter PCR uses two sets of primers, i.e., gene specific primers and primers to install the attB sequences. Desired DNA sequence primers were designed which included 12 base pairs of the attB1 or attB2 sequences at the 5′ end. The primers that were used were as follows:

attB1 gene specific forward primer
5′ CCTGCAGGACCATG forward gene specific primer 3′
attB2 gene specific reverse primer
5′ CCTGCAGGCTCGAGCTA reverse gene specific primer

3′

[0708] The second set of primers were attB adapter primers with the following sequences:

attB1 adapter forward primer
5′ GGGGACAAGTTTGTACAAAAAAGCAGGCTCCTGCAGGACCATG 3′
attB2 adapter reverse primer
5′ GGGGACCACTTTGTACAAGAAAGCTGGGTCCCTGCAGGCTCGAGCTA

3′.

[0709] attB1 and attB2 flanked sequences were amplified by PCR according to the methods described by Invitrogen Life Technologies (Carlsbad, Calif.). attB flanked PCR products were purified and recovered from a gel as described above. Examples of gene specific primers of the current invention are disclosed in SEQ ID NO: X-Y.

[0710] In some instances, attB flanked sequences were recovered from PCR, but could not be inserted into the Donor Vector using GATEWAY™ technology. Conventional cloning methods using ligases were used to insert a DNA sequence into an Entry Vector (Invitrogen Life Technologies, Carlsbad, Calif.) when GATEWAY™ recombination into the Donor Vector failed. The choice of Entry Vector depended on the compatibility of restriction endonuclease sites in the Entry Vector and desired insert sequence. The Entry Vector was digested with a selected restriction endonuclease to remove the ccdB gene, dephosphorylated and gel purified. The selected restriction endonuclease depended on the Entry Vector used and the sequence of the desired insert sequence. For example, the ccdB gene was removed from pENTR11 using EcoR1 or other combinations of restriction endonucleases such as EcoRV, and XmaI or NcoI and XhoI. Other restriction nucleases could be used with other Entry Vectors for use in the GATEWAY™ process. To use restriction endonuclease digested Entry Vectors, it was necessary to be able to produce compatible sticky ends on the desired PCR product. Sticky ends could be produced by a number of methods known to those of skill in the art, such as restriction endonuclease digestion, adapter ligation or addition of restriction sites during PCR.

[0711] In some instances, it was not possible to produce compatible sticky ends on a PCR fragment and an Entry Vector. Alternatively, compatible sticky ends could be produced directed by restriction enzyme digestion of a cDNA clone. It was possible, however, to blunt end ligate PCR fragments into an Entry Vector. Using this method, the Entry Vector was cut with a restriction endonuclease to remove the ccdB gene. A gel purified linear Entry Vector was made blunt ended with T4 DNA polymerase. One of skill in the art is aware of other methods of making blunt ended DNA molecules, such as the use of Klenow DNA polymerase. The PCR product was made blunt ended and preferably dephosphorylated by incubation with T4 DNA polymerase, or another suitable polymerase, T4 polynucleotide kinase and a phosphatase enzyme. The Entry Vector and PCR product were blunt end ligated using methods known in the art. Ligation products were transformed into E. coli and plasmids from individual colonies analyzed for presence of the insert DNA and the desired orientation relative to the attL sites in the Entry Vector. Clones with the attL1 sequence next to the amino end of the open reading frame were selected.

[0712] Preferably, the TA method of cloning PCR products (Marchuk et al., 1991) was used when attB flanked PCR products could not be inserted into a plasmid using GATEWAY™ methods. The TA method takes advantage of Taq polymerase terminal transferase activity. An Entry Vector was cut with a restriction endonuclease and made blunt ended using the methods described herein. The blunt ended linear Entry Vector was incubated with dTTP and Taq polymerase resulting in the addition of a single thymidine residue at the 3′ end of each DNA strand. Since Taq polymerase has a strong preference for dATP, PCR products are most often produced with a single adenosine added to the 3′ end. Therefore,the Entry Vector and PCR product have complimentary single base 3′ overhangs. Following ligation under conditions known to those of skill in the art, plasmids were transformed into E. coli. Plasmids were isolated from individual colonies and analyzed to identify plasmids with the desired insert in the correct orientation. Alternatively, PCR products, tailed with attB sites were TA cloned into a commercial TA cloning vector, such as pGEM-T EASY (Promega Corporation, Madison, Wis).

[0713] All PCR amplification products were sequenced prior to introduction into a plant. PCR inserts in Destination expression vectors produced by GATEWAY™ methods were sequenced to confirm that the inserted sequenced encoded the expected amino acid sequence. If Entry Vectors were produced using ligation methods, the inserted sequence was sequenced in the Entry Vector prior to production of the Destination expression vector using GATEWAY™ technology. Point mutations which did not affect the amino acid coding sequence, i.e., silent mutations, were accepted.

### Example 3

[0714] Construction of Expression Vectors

[0715] GATEWAY™ cloning methods (Invitrogen Life Technologies, Carlsbad, Calif.) were used to construct expression vectors for use in maize transformation. The GATEWAY™ methods are fully described in the GATEWAY™ Cloning Technology Instruction Manual (Invitrogen Life Technologies, Carlsbad, Calif.). Use of the GATEWAY™ system facilitates high throughput cloning of coding sequences into a plant expression vector. Gene sequences flanked by attB1 and attB2 sequences were produced by PCR as described in Example 2. Depending on which recombination sequence, attB1 and attB2, was placed 5′ and 3′ to the coding sequence, sense or antisense expression vectors were produced. A plant expression vector, pMON65 154, into which any coding sequence could be inserted in a sense or antisense orientation was constructed as described in Example 1 and was used as a destination vector in the GATEWAY™ cloning process.

[0716] Two alternative processes were used for inserting a PCR amplified coding sequence into a plant expression vector. In the first method, a PCR product comprising the coding sequence of interest flanked by attB1 and attB2 sequences at the 5′ and 3′ ends was incubated with the donor vector (pDONR201™, Invitrogen Life Technologies, Carlsbad, Calif.) in the presence of BP CLONASE™. GATEWAY™ entry clones were produced from this reaction and transformed into E. coli. Plasmid DNA was isolated from entry clones. Inserted coding sequences could be sequenced from entry vectors in order to confirm the fidelity of PCR amplification. Plasmid DNA, isolated from entry clone E. coli colonies, was incubated with linearized destination vector, preferably pMON65 154, in the presence of LR CLONASE™ to produce plant expression vectors comprising the coding sequence of interest. DNA from the LR CLONASE™ reaction was transformed into E. coli. Plasmid DNA from destination expression vectors was isolated and sequenced in order to determine correct orientation and sequence of the plant expression vector.

[0717] In the second method of generating plant expression vectors, a PCR product flanked by attB1 and attB2 sequences was incubated with a donor vector (pDONR201™, Invitrogen Life Technologies, Carlsbad, Calif.), and BP CLONASE™ as described above. Following incubation, an aliquot of the reaction mix was further incubated with linearized destination vector and LR CLONASE™. The resultant DNA was transformed into E. Coli and plant expression vectors containing the coding sequence of interest selected using PCR or Southern blot analysis techniques known in the art. Both methods of producting plant expression vectors comprising a coding sequence of interest were described by Invitrogen Life Technologies (GATEWAY™ Cloning Technology Instruction Manual).

[0718] Alternatively, Entry Vectors were produced using restriction endonucleases and ligases. Entry Vectors are available from Invitrogen Life Technlogies (Carlsbad, Calif.). Each entry vector, e.g., pENTR1A, pENTR2B, pENTR3C, pENTR4, and pENTR11, has unique cloning and expression features. pENTR11 was preferably used in the practice of the present invention. Those of skill in the art will recognize the usefulness of the other Entry Vectors. Before using restriction endonucleases and ligases to insert desired sequences into one of the Entry Vectors, it was necessary to restriction digest the Entry Vector on each side of the ccdB gene. A number of different combinations of restriction endonucleases were used depending on the restriction sites present on the DNA sequence to be inserted into the Entry Vector. Preferably the Entry Vector was dephosphorylated and gel purified after restriction digestion. The desired DNA sequence was inserted into the Entry Vector using conventional methods of molecular biology known to those of skill in the art. TA cloning (U.S. Pat. No. 5,827,657) is a preferable method of cloning PCR fragments into an Entry Vector.

[0719] Vectors (designated as pMON and a 5 digit number) and coding sequences contained there that were produced using the GATEWAY™ cloning methods are listed in Table 4 (Example 9). It is expected that the majority of the coding sequences of the present invention may be cloned into a plant expression vectors using the methods derscribed herein.

### Example 4

[0720] Preparation of Recipient Cells

[0721] LH59 plants were grown in the greenhouse. Ears were harvested from plants when the embryos were 1.5 to 2.0 mm in length, usually 10 to 15 days after pollination, and most frequently 11 to 12 days after pollination. Ears were surface sterilized by spraying or soaking the ears in 80% ethanol, followed by air drying. Alternatively, ears were surface sterilized by immersion in 50% CLOROX™ containing 10% SDS for 20 minutes, followed by three rinses with sterile water.

[0722] Immature embryos were isolated from individual kernels using methods known to those of skill in the art. Immature embryos were cultured on medium 211 (N6 salts, 2% sucrose, 1 mg/L 2,4-D, 0.5 mg/L niacin, 1.0 mg/L thiamine-HCl, 0.91 g/L L-asparagine, 100 mg/L myo-inositiol, 0.5 g/L MES, 100 mg/L casein hydrolysate, 1.6 g/L MgCl₂, 0.69 g/L L-proline, 2 g/L GELGRO™, pH 5.8) containing 16.9 mg/L AgNO₃, (designated medium 211V) for 3-6 days, preferably 3-4 days prior to microprojectile bombardment.

### Example 5

[0723] Transformation of Maize Immature Embryos Using A. tumefaciens

[0724] Methods of Agrobacterium mediated transformation of maize cells and other monocots are known (Hiei et al., 1997; U.S. Pat. No. 5,591,616; U.S. Pat. No. 5,981,840; published EP patent application EP 0 672 752). Although various strains of Agrobacterium may be used (see references above), strain ABI is used preferably by the present inventors. The ABI strain of Agrobacterium is derived from strain A208, a C58 nopaline type strain, from which the Ti plasmid was eliminated by culture at 37° C., and further containing the modified Ti plasmid pMP90RK (Koncz and Schell, 1986). An Agrobacterium tumefaciens binary vector system (An et al., 1998) is preferably used to transform maize. Alternative cointegrating Ti plasmid vectors have been described (Rogers et al., 1988) and could be used to transform maize. A binary vector comprising one or more genes of interest may be introduced into a disarmed Agrobacterium strain using electroporation (Wen-jun and Forde, 1989) or triparental mating (Ditta et al., 1980). A binary vector may contain a selectable marker gene, a screenable marker gene and/or one or more genes that confer a desirable phenotypic trait on the transformed plant.

[0725] Prior to co-culture of maize cells, Agrobacterium cells may be grown at 28° C. in LB (DIFCO) liquid medium comprising appropriate antibiotics to select for maintenance of the modified Ti plasmid and binary vector. For example, ABI/pMON30113, may be grown in LB medium containing 50 ug/ml kanamycin to select for maintenance of the pMP90RK modified Ti plasmid and 100 ug/ml spectinomycin to select for maintenance of the binary vector pMON30113. It will be obvious to one of skill in the art to use appropriate selection agents to maintain plasmids in the host Agrobacterium strain. Prior to inoculation of maize cells, Agrobacterium cells are grown overnight at room temperature in AB medium (Chilton et al, 1974) comprising appropriate antibiotics for plasmid maintenance and 200 uM acetosyringone. Immediately prior to inoculation of maize cells, Agrobacterium are preferably pelleted by centrifugation, washed in ½ MSVI medium (2.2 g/L GIBCO (Carlsbad, Calif.) MS salts, 2 mg/L glycine, 0.5 g/L niacin, 0.5 g/L L-pyridoxine-HCl, 0.1 mg/L thiamine, 115 g/L L-proline, 10 g/L D-glucose, and 10 g/L sucrose, pH 5.4) containing 200 uM acetosyringone, and resuspended at 0.1 to 1.0×10⁹ cells/ml in ½ MSPL medium (2.2 g/L GIBCO (Carlsbad, Calif.) MS salts, 2 mg/L glycine, 0.5 g/L niacin, 0.5 g/L L-pyridoxine-HCl, 0.1 mg/L thiamine, 115 g/L L-proline, 26 g/L D-glucose, 68.5 g/L sucrose, pH 5.4) containing 200 uM acetosyringone. One of skill in the art may substitute other media for ½ MSVI or ½ MSPL.

[0726] Immature maize embryos are isolated as described previously. Embryos are inoculated with Agrobacterium 0-7 days after excision, preferably immediately after excision. Alternatively, immature embryos may be cultured for more than 7 days. For example, embryogenic callus may be initiated as described above and co-cultured with Agrobacterium. Preferably, immature maize embryos are excised, immersed in an Agrobacterium suspension in ½ MSPL medium prepared as described above and incubated at room temperature with Agrobacterium for 5-20 minutes.

[0727] Following inoculation embryos are transferred to one-half strength MS medium (Murashige and Skoog, 1962) containing 3.0 mg/L 2,4-dichlorophenyoxyacetic acid (2,4-D), 1% D-glucose, 2% sucrose, 0.115 g/L L-proline, 0.5 mg/L thiamine-HCl, 200 uM acetosyringone, and 20 uM silver nitrate or silver thiosulfate. Immature embryos are co-cultured with Agrobacterium for 1 to 3 days at 23° C. in the dark. One of skill in the art may substitute other media for the described media.

[0728] Co-cultured embryos are transferred to medium 15AA (462 mg/L (NH4)SO4, 400 mg/L KH2PO4, 186 mg/L MgSO4-7H20, 166 mg7L CaCl2-2H20, 10 mg/L MnSO4-H2O, 3 mg/L H3B03, 2 mg/L ZnSO4-7H20, 0.25 mg/L NaMoO4-2H20, 0.025 mg/L CuSO4-5H20, 0.025 mg/L CoCl2-6H20, 0.75 mg/L KI, 2.83 g/L KNO3, 0.2 mg/L niacin, 0.1 mg/L thiamine-HCl, 0.2 mg/L pyridoxine-HCl, 0.1 mg/L D-biotin, 0.1 mg/L choline chloride, 0.1 mg/L calcium pantothenate, 0.05 mg/L folic acid, 0.05 mg/L p-aminobenzoic acid, 0.05 mg/L riboflavin, 0.015 mg/L vitamin B12, 0.5 g/L casamino acids, 33.5 mg/L Na2EDTA, 1.38 g/L L-proline, 20 g/L sucrose, 10 g/L D-glucose), or MS medium containing 1.5 mg/L 2,4-D, 500 mg/L carbenicillin, 3% sucrose, 1.38 g/L L-proline and 20 uM silver nitrate or silver thiosulfate and cultured for 0 to 8 days in the dark at 27° C. without selection. Culture media used for selection of transformants and regeneration of plants preferably contains 500 mg/L carbenicillin. One of skill in the art may substitute other antibiotics that control growth of Agrobacterium. Other culture media that support cell culture may be used alternatively. In the absence of a delay of selection (0 day culture), selection may be initiated on 25 mg/L paromomycin. Selection medium may comprise medium 211 (described above) or a variant of medium 211 in which N6 salts are replaced by MS salts. After two weeks, embryogenic callus are transferred to culture medium containing 100 mg/L paromomycin and subcultured at about two week intervals. When selection is delayed following co-culture, embryos are initially cultured on medium containing 50 mg/L paromomycin followed by subsequent culture of embryogenic callus on medium containing 100-200 mg/L paromomycin. One of skill in the art will culture tissue on concentrations of paromomycin which inhibit growth of cells lacking the selectable marker gene, but a concentration on which transformed callus will proliferate. Alternatively, one may use other selectable markers to identify transformed cells. It is believed that initial culture on 25 to 50 mg/L paromocyin for about two weeks, followed by culture on 50-200 mg/L paromoycin will result in recovery of transformed callus. Transformants are recovered 6 to 8 weeks after initiation of selection. Plants are regenerated from transformed embryogenic callus as described above for transformants recovered following microprojectile bombardment.

### Example 6

[0729] Agrobacterium Mediated Transformation of Maize Callus

[0730] This example describes methods for transformation of maize callus using Agrobacterium. The method is exemplified using an nptII selectable marker gene and paromomycin selective agent. One of skill in the art will be aware of other selectable marker and selective agent combinations that could be used alternatively.

[0731] Callus was initiated from immature embryos using methods known to those of skill in the art. For example, 1.5 mm to 2.0 mm immature embryos were excised from developing maize seed of a genotype such as LH59 and cultured with the embryonic axis side down on medium 211V (described in Example 4 above), usually for 8-21 days after excision. Alternatively, established an established callus culture may be initiated and maintained by methods known to those of skill in the art.

[0732] Agrobacterium was prepared for inoculation of plant tissue according to the methods described in Example 5. Fifty to 100 pieces of callus was transferred to a 60 mm×20 mm petri dish containing about 15 ml of Agrobacterium suspension at 0.1 to 1.0×10⁹ cfu/ml. A piece of callus was usually all of the callus produced by an immature embryo in up to 21 days of culture or a piece of established callus of 2 mm to 8 mm in diameter. Callus was incubated for about 30 minutes at room temperature with the Agrobacterium suspension, followed by removal of the liquid by aspiration.

[0733] About 50 μL of sterile distilled water was added to a Whatman #1 filter paper in a 60 mm×20 mm petri dish. After 1-5 minutes, 15 to 20 pieces of callus were transferred to each filter paper and the plate sealed with PARAFILM®, for example. The callus and Agrobacterium were co-cultured for about 3 days at 23° C. in the dark.

[0734] Calli were transferred from filter paper to medium 211 with 20 μM silver nitrate and 500 mg/L carbenicillin and cultured in the dark at 27° C. to 28° C. for 2-5 days, preferably 3 days. Selection was initiated by transferring callus to medium 211 containing 20 μM silver nitrate, 500 mg/L carbenicillin and 25 mg/L paromomycin. After 2 weeks culture in the dark at 27° C. to 28° C., callus was transferred to medium 211 with 20 μM silver nitrate, 500 mg/L carbenicillin and 50 mg/L paromomycin (medium 211QRG). Callus was subcultured after two weeks to fresh medium 211 QRG and further cultured for two weeks in the dark at 27° C. to 28° C. Callus was then transferred to medium 211 with 20 μM silver nitrate, 500 mg/L carbenicillin and 75 mg/L paromomycin. After 2-3 weeks culture in the dark at 27° C. to 28° C., paromomycin resistant callus was identified. One of skill in the art would recognize that times between subcultures of callus are approximate and one may be able to accelerate the selection process by transferring tissue at more frequent intervals, e.g., weekly rather than biweekly.

[0735] Plants were regenerated from transformed callus, transferred to soil and grown in the greenhouse as described in Example 9. Following Agrobacterium mediated transformation, medium 217 (see Example 9) further contained 500 mg/L carbenicillin and medium 127T (see Example 9) further contained 250 mg/L carbenicillin. Transformed maize plants comprising genes of the present invention that were produced using Agrobacterium mediated transformation are summarized in Table 4 (Example 9).

### Example 7

[0736] Methods of Microprojectile Bombardment

[0737] Approximately four hours prior to microprojectile bombardment, immature embryos were transferred to medium 211SV (medium 211V with the addition of sucrose to 12%). Twenty five immature embryos were preferably placed in a 60×15 mm petri dish, arranged in a 5×5 grid with the coleoptilar end of the scutellum pressed slightly into the culture medium at a 20 degree angle. Tissue was maintained in the dark prior to bombardment.

[0738] Prior to microprojectile bombardment, a suspension of gold particles was prepared onto which the desired DNA was precipitated. Ten milligrams of 0.6 μm gold particles (BioRad) were suspended in 50 μL buffer (150 mM NaCl, 10 mM Tris-HCl, pH 8.0). Twenty five μL of a 2.4 nM solution of the desired DNA was added to the suspension of gold particles and gently vortexed for about five seconds. Seventy five μL of 0.1M spermidine was added and the solution vortexed gently for about 5 seconds. Seventy five μL of a 25% solution of polyethylene glycol (3000-4000 molecular weight, American Type Culture Collection) was added and the solution was gently vortexed for five seconds. Seventy five μL of 2.5 M CaCl₂ was added and the solution vortexed for five seconds. Following the addition of CaCl₂, the solution was incubated at room temperature for 10 to 15 minutes. The suspension was subsequently centrifuged for 20 seconds at 12,000 rpm (Sorval MC-12V centrifuge) and the supernatant discarded. The gold particle/DNA pellet was washed twice with 100% ethanol and resuspended in 10 mL 100% ethanol. The gold particle/DNA preparation was stored at −20° C. for up to two weeks.

[0739] DNA was introduced into maize cells using the electric discharge particle acceleration gene delivery device (U.S. Pat. No. 5,015,580). The gold particle/DNA suspension was coated on Mylar sheets (Du Pont Mylar polyester film type SMMC2, aluminum coated on one side, over coated with PVDC co-polymer on both sides, cut to 18 mm square) by dispersion of 310 to 320 μL of the gold particle/DNA suspension on a sheet. After the gold particle suspension settled for one to three minutes, excess ethanol was removed and the sheets were air dried. Microprojectile bombardment of maize tissue was conducted as described in U.S. Pat. No. 5,015,580. AC voltage may be varied in the electric discharge particle delivery device. For microprojectile bombardment of LH59 pre-cultured immature embryos, 35% to 45% of maximum voltage was preferably used. Following microproj ectile bombardment, tissue was cultured in the dark at 27° C.

### Example 8

[0740] Selection of Transformed Cells

[0741] Transformants were selected on culture medium comprising paromomycin, based on expression of a transgenic neomycin phosphotransferase II (nptII) gene. Twenty four hours after DNA delivery, tissue was transferred to 211V medium containing 25 mg/L paromomycin (medium 211HV). After three weeks incubation in the dark at 27° C., tissue was transferred to medium 211 containing 50 mg/L paromomycin (medium 211G). Tissue was transferred to medium 211 containing 75 mg/L paromomycin (medium 211XX) after three weeks. Transformants were isolated following 9 weeks of selection. Table 4 (Example 9) dislcoses results of transformant experiments using the methods of microprojectile bombardment disclosed herein.

### Example 9

[0742] Regeneration of Fertile Transgenic Plants

[0743] Fertile transgenic plants were produced from transformed maize cells. Transformed callus was transferred to medium 217 (N6 salts, 1 mg/L thiamine-HCl, 0.5 mg/L niacin, 3.52 mg/L benzylaminopurine, 0.91 mg/L L-asparagine monohydrate, 100 mg/L myo-inositol, 0.5 g/L MES, 1.6 g/L MgCl₂-6H₂O, 100 mg/L casein hydrolysate, 0.69 g/L L-proline, 20 g/L sucrose, 2 g/L GELGRO™, pH 5.8) for five to seven days in the dark at 27° C. Somatic embryos mature and shoot regeneration began on medium 217. Tissue was transferred to medium 127T (MS salts, 0.65 mg/L niacin, 0.125 mg/L pyridoxine-HCl, 0.125 mg/L thiamine-HCl, 0.125 mg/L Ca pantothenate, 150 mg/L L-asparagine, 100 mg/L myo-inositol, 10 g/L glucose, 20 g/L L-maltose, 100 mg/L paromomycin, 5.5 g PHYTAGAR™, pH 5.8) for shoot development. Tissue on medium 127T was cultured in the light at 400-600 lux at 26° C. Plantlets are transferred to soil, preferable 3 inch pots, about four to 6 weeks after transfer to 127T medium when the plantlets are about 3 inches tall and have roots. Plants were maintained for two weeks in a growth chamber at 26° C., followed by two weeks on a mist bench in a greenhouse before transplanting to 5 gallon pots for greenhouse growth. Plants were grown in the greenhouse to maturity and reciprocal pollinations were made with the inbred LH59. Seed was collected from plants and used for further breeding activities. Table 4 (below) summarizes transgenic plants containing the genes of the present invention that have been transferred to soil. The occurrence of pollinations is further noted in Table 4 . In addition, the production of seed from fertile transgenic maize plants comprising the genes of the present invention are summarized in Table 4.

TABLE 4

| | | | | Events With | | Events |
|---|---|---|---|---|---|---|
| | pMON Vector | | Events | Plants | Events | Producing |
| PHE_ID | Number | Transformation Technique | Created | Regenerated | Pollinated | Seed |
| PHE0000006 | PMON68861 | Microprojectile bombardment | 203 | 68 | 18 | 17 |
| PHE0000009 | PMON67803 | Microprojectile bombardment | 182 | 30 | 15 | 6 |
| PHE0000010 | PMON67800 | Microprojectile bombardment | 131 | 68 | 35 | 27 |
| PHE0000012 | PMON67806 | Microprojectile bombardment | 112 | 36 | 12 | 7 |
| PHE0000012 | PMON67808 | Microprojectile bombardment | 441 | 88 | 35 | 26 |
| PHE0000013 | PMON69451 | Microprojectile bombardment | 234 | 88 | 25 | 19 |
| PHE0000013 | PMON69452 | Microprojectile bombardment | 486 | 119 | 45 | 33 |
| PHE0000016 | PMON67750 | Microprojectile bombardment | 125 | 11 | 7 | 6 |
| PHE0000017 | PMON68850 | Microprojectile bombardment | 140 | 26 | 16 | 14 |
| PHE0000022 | PMON67826 | Microprojectile bombardment | 111 | 43 | 16 | 12 |
| PHE0000024 | PMON68354 | Microprojectile bombardment | 318 | 134 | 78 | 68 |
| PHE0000024 | PMON68354 | Microprojectile bombardment | 318 | 134 | 78 | 68 |
| PHE0000025 | PMON68396 | Agrobacterium | 36 | | | |
| PHE0000025 | PMON68396 | Agrobacterium | 36 | | | |
| PHE0000034 | PMON67805 | Microprojectile bombardment | 158 | 53 | 25 | 22 |
| PHE0000038 | PMON68383 | Microprojectile bombardment | 78 | 19 | 3 | 2 |
| PHE0000039 | PMON67807 | Microprojectile bombardment | 120 | 25 | 8 | 7 |
| PHE0000040 | PMON67801 | Microprojectile bombardment | 42 | 17 | 11 | 8 |
| PHE0000040 | PMON77889 | Microprojectile bombardment | 118 | 7 | | |
| PHE0000051 | PMON68859 | Microprojectile bombardment | 50 | 26 | 16 | 15 |
| PHE0000052 | PMON67813 | Microprojectile bombardment | 168 | 62 | 37 | 27 |
| PHE0000055 | PMON68355 | Microprojectile bombardment | 242 | 36 | 19 | 15 |
| PHE0000056 | PMON68364 | Microprojectile bombardment | 501 | 94 | 26 | 19 |
| PHE0000057 | PMON68350 | Microprojectile bombardment | 128 | 52 | 20 | 11 |
| PHE0000058 | PMON68351 | Microprojectile bombardment | 89 | 45 | 21 | 17 |
| PHE0000059 | PMON68370 | Microprojectile bombardment | 120 | 24 | 7 | 5 |
| PHE0000060 | PMON68356 | Microprojectile bombardment | 76 | 22 | 13 | 11 |
| PHE0000064 | PMON67804 | Microprojectile bombardment | 138 | 33 | 12 | 10 |
| PHE0000067 | PMON67816 | Microprojectile bombardment | 151 | 66 | 24 | 19 |
| PHE0000068 | PMON67824 | Microprojectile bombardment | 6 | 4 | 2 | 1 |
| PHE0000069 | PMON67821 | Microprojectile bombardment | 102 | 22 | 10 | 8 |
| PHE0000070 | PMON67825 | Microprojectile bombardment | 288 | 94 | 45 | 33 |
| PHE0000072 | PMON67828 | Microprojectile bombardment | 117 | 29 | 7 | 5 |
| PHE0000073 | PMON68357 | Microprojectile bombardment | 127 | 44 | 35 | 27 |
| PHE0000074 | PMON68352 | Microprojectile bombardment | 127 | 30 | 9 | 7 |
| PHE0000076 | PMON68851 | Microprojectile bombardment | 167 | 31 | 11 | 6 |
| PHE0000077 | PMON67827 | Microprojectile bombardment | 166 | 40 | 11 | 10 |
| PHE0000077 | PMON75301 | Agrobacterium | 9 | | | |
| PHE0000078 | PMON69471 | Microprojectile bombardment | 135 | 31 | 11 | 11 |
| PHE0000078 | PMON77877 | Microprojectile bombardment | 28 | 9 | | |
| PHE0000079 | PMON67752 | Microprojectile bombardment | 219 | 44 | 26 | 25 |
| PHE0000086 | PMON67812 | Microprojectile bombardment | 192 | 60 | 25 | 20 |
| PHE0000091 | PMON68358 | Microprojectile bombardment | 119 | 36 | 8 | 5 |
| PHE0000092 | PMON68359 | Microprojectile bombardment | 99 | 34 | 23 | 12 |
| PHE0000098 | PMON73168 | Microprojectile bombardment | 49 | 20 | 2 | 2 |
| PHE0000102 | PMON67815 | Microprojectile bombardment | 145 | 19 | 10 | 4 |
| PHE0000104 | PMON68608 | Microprojectile bombardment | 108 | 30 | 22 | 18 |
| PHE0000106 | PMON69457 | Microprojectile bombardment | 33 | 22 | 5 | 4 |
| PHE0000108 | PMON67849 | Microprojectile bombardment | 71 | 24 | 11 | 7 |
| PHE0000114 | PMON68361 | Microprojectile bombardment | 92 | 18 | 13 | 12 |
| PHE0000115 | PMON68362 | Microprojectile bombardment | 56 | 2 | | |
| PHE0000116 | PMON68367 | Microprojectile bombardment | 165 | 55 | 18 | 14 |
| PHE0000117 | PMON68368 | Microprojectile bombardment | 100 | 35 | 9 | 4 |
| PHE0000118 | PMON67811 | Microprojectile bombardment | 39 | 19 | 16 | 11 |
| PHE0000119 | PMON68363 | Microprojectile bombardment | 99 | 46 | 17 | 11 |
| PHE0000120 | PMON68853 | Microprojectile bombardment | 141 | 40 | 12 | 9 |
| PHE0000121 | PMON68854 | Microprojectile bombardment | 270 | 55 | 14 | 12 |
| PHE0000122 | PMON74402 | Microprojectile bombardment | 261 | 24 | 2 | 2 |
| PHE0000123 | PMON68855 | Microprojectile bombardment | 61 | 28 | 17 | 11 |
| PHE0000124 | PMON68856 | Microprojectile bombardment | 161 | 34 | 13 | 12 |
| PHE0000125 | PMON68369 | Microprojectile bombardment | 135 | 77 | 46 | 44 |
| PHE0000126 | PMON69458 | Microprojectile bombardment | 112 | 29 | 14 | 12 |
| PHE0000127 | PMON68887 | Microprojectile bombardment | 55 | 35 | 26 | 24 |
| PHE0000133 | PMON68860 | Microprojectile bombardment | 256 | 91 | 25 | 19 |
| PHE0000152 | PMON77899 | Microprojectile bombardment | 94 | 2 | | |
| PHE0000153 | PMON67817 | Microprojectile bombardment | 187 | 69 | 27 | 13 |
| PHE0000154 | PMON67818 | Microprojectile bombardment | 143 | 32 | 24 | 22 |
| PHE0000158 | PMON73169 | Microprojectile bombardment | 138 | 41 | 23 | 17 |
| PHE0000160 | PMON75485 | Microprojectile bombardment | 50 | 22 | 8 | 2 |
| PHE0000162 | PMON75488 | Microprojectile bombardment | 79 | 25 | 12 | 3 |
| PHE0000164 | PMON73170 | Microprojectile bombardment | 60 | 25 | 9 | 6 |
| PHE0000168 | PMON68857 | Microprojectile bombardment | 66 | 34 | 23 | 19 |
| PHE0000173 | PMON73171 | Microprojectile bombardment | 104 | 36 | 10 | 7 |
| PHE0000174 | PMON72465 | Microprojectile bombardment | | | | |
| PHE0000176 | PMON68388 | Microprojectile bombardment | 55 | 24 | 13 | 11 |
| PHE0000177 | PMON68881 | Microprojectile bombardment | 39 | 23 | 14 | 14 |
| PHE0000178 | PMON73166 | Microprojectile bombardment | 42 | 13 | 6 | 4 |
| PHE0000179 | PMON69467 | Microprojectile bombardment | 47 | 11 | 5 | 3 |
| PHE0000181 | PMON76326 | Microprojectile bombardment | 103 | 9 | | |
| PHE0000182 | PMON74420 | Microprojectile bombardment | 164 | 27 | 3 | 3 |
| PHE0000185 | PMON69468 | Microprojectile bombardment | 53 | 27 | 9 | 9 |
| PHE0000186 | PMON69460 | Microprojectile bombardment | 52 | 31 | 7 | 3 |
| PHE0000188 | PMON73167 | Microprojectile bombardment | 168 | 43 | 12 | 8 |
| PHE0000192 | PMON68394 | Agrobacterium | 81 | 2 | 2 | 2 |
| PHE0000193 | PMON68889 | Microprojectile bombardment | 78 | 21 | 8 | 7 |
| PHE0000219 | PMON68865 | Microprojectile bombardment | 52 | 24 | 7 | 7 |
| PHE0000220 | PMON74434 | Microprojectile bombardment | 43 | 28 | 21 | 19 |
| PHE0000223 | PMON69478 | Microprojectile bombardment | 126 | 38 | 28 | 24 |
| PHE0000227 | PMON68376 | Microprojectile bombardment | 119 | 40 | 11 | 6 |
| PHE0000231 | PMON72498 | Microprojectile bombardment | 102 | 29 | 20 | 19 |
| PHE0000232 | PMON68895 | Microprojectile bombardment | 129 | 35 | 9 | 7 |
| PHE0000234 | PMON73159 | Microprojectile bombardment | 48 | | | |
| PHE0000235 | PMON73161 | Microprojectile bombardment | 25 | 10 | 4 | 3 |
| PHE0000237 | PMON68891 | Microprojectile bombardment | 45 | 22 | 9 | 6 |
| PHE0000238 | PMON69466 | Microprojectile bombardment | 88 | 37 | 13 | 12 |
| PHE0000239 | PMON72466 | Microprojectile bombardment | 98 | 29 | 15 | 13 |
| PHE0000240 | PMON72468 | Microprojectile bombardment | 78 | 20 | 10 | 8 |
| PHE0000242 | PMON72470 | Microprojectile bombardment | 134 | 28 | 11 | 9 |
| PHE0000243 | PMON72467 | Microprojectile bombardment | 54 | 29 | 11 | 6 |
| PHE0000244 | PMON68372 | Microprojectile bombardment | 117 | 32 | 11 | 7 |
| PHE0000245 | PMON68373 | Microprojectile bombardment | 27 | 26 | 20 | 17 |
| PHE0000246 | PMON68374 | Microprojectile bombardment | 112 | 54 | 12 | 9 |
| PHE0000247 | PMON68375 | Microprojectile bombardment | 150 | 42 | 16 | 8 |
| PHE0000249 | PMON74422 | Microprojectile bombardment | 52 | 20 | 9 | 7 |
| PHE0000252 | PMON74407 | Microprojectile bombardment | 52 | 28 | 15 | 8 |
| PHE0000254 | PMON73172 | Microprojectile bombardment | 109 | 29 | 10 | 8 |
| PHE0000255 | PMON72459 | Microprojectile bombardment | 73 | 31 | 12 | 9 |
| PHE0000256 | PMON75302 | Agrobacterium | 161 | 37 | 1 | 1 |
| PHE0000258 | PMON68371 | Microprojectile bombardment | 113 | 40 | 8 | 5 |
| PHE0000259 | PMON74404 | Microprojectile bombardment | 113 | 26 | 18 | 15 |
| PHE0000260 | PMON75487 | Microprojectile bombardment | 45 | 14 | 9 | 1 |
| PHE0000262 | PMON68892 | Microprojectile bombardment | 141 | 11 | 2 | 2 |
| PHE0000263 | PMON74412 | Microprojectile bombardment | 95 | 27 | 13 | 8 |
| PHE0000264 | PMON68866 | Microprojectile bombardment | 128 | 38 | 12 | 11 |
| PHE0000265 | PMON69469 | Microprojectile bombardment | 73 | 8 | 4 | 3 |
| PHE0000266 | PMON69470 | Microprojectile bombardment | 47 | 19 | 9 | 8 |
| PHE0000267 | PMON68867 | Microprojectile bombardment | 82 | 39 | 16 | 15 |
| PHE0000273 | PMON74423 | Microprojectile bombardment | 20 | 3 | | |
| PHE0000276 | PMON68868 | Microprojectile bombardment | 97 | 65 | 6 | 5 |
| PHE0000277 | PMON68890 | Microprojectile bombardment | 107 | 17 | 5 | 4 |
| PHE0000278 | PMON68886 | Microprojectile bombardment | 88 | 31 | 14 | 9 |
| PHE0000279 | PMON68896 | Microprojectile bombardment | 127 | 44 | 10 | 7 |
| PHE0000280 | PMON72451 | Microprojectile bombardment | 79 | 27 | 8 | 6 |
| PHE0000281 | PMON72452 | Microprojectile bombardment | 44 | 3 | 1 | 1 |
| PHE0000283 | PMON69472 | Microprojectile bombardment | 118 | 17 | 4 | 3 |
| PHE0000284 | PMON72453 | Microprojectile bombardment | | | | |
| PHE0000286 | PMON72454 | Microprojectile bombardment | | | | |
| PHE0000287 | PMON68898 | Microprojectile bombardment | 61 | 34 | 15 | 9 |
| PHE0000291 | PMON72455 | Microprojectile bombardment | 34 | 26 | 8 | 6 |
| PHE0000292 | PMON68888 | Microprojectile bombardment | 57 | 28 | 14 | 7 |
| PHE0000294 | PMON68897 | Microprojectile bombardment | 79 | 27 | 5 | 4 |
| PHE0000295 | PMON68894 | Microprojectile bombardment | 83 | 37 | 13 | 12 |
| PHE0000296 | PMON68893 | Microprojectile bombardment | 60 | 5 | 2 | 2 |
| PHE0000297 | PMON68899 | Microprojectile bombardment | 49 | 19 | 5 | 5 |
| PHE0000298 | PMON68874 | Microprojectile bombardment | 5 | | | |
| PHE0000299 | PMON68875 | Microprojectile bombardment | 64 | 16 | 7 | 7 |
| PHE0000300 | PMON68876 | Microprojectile bombardment | 106 | 30 | 8 | 5 |
| PHE0000301 | PMON68877 | Microprojectile bombardment | 127 | 31 | 14 | 11 |
| PHE0000302 | PMON68878 | Microprojectile bombardment | 119 | 35 | 5 | 1 |
| PHE0000303 | PMON68879 | Microprojectile bombardment | 4 | | | |
| PHE0000304 | PMON68873 | Microprojectile bombardment | 89 | 42 | 19 | 11 |
| PHE0000305 | PMON68880 | Microprojectile bombardment | 71 | 32 | 11 | 7 |
| PHE0000306 | PMON68882 | Microprojectile bombardment | 88 | 35 | 7 | 6 |
| PHE0000307 | PMON68883 | Microprojectile bombardment | 82 | 26 | 6 | 4 |
| PHE0000308 | PMON68884 | Microprojectile bombardment | 153 | 48 | 16 | 7 |
| PHE0000309 | PMON68885 | Microprojectile bombardment | 51 | 16 | 8 | 5 |
| PHE0000310 | PMON68377 | Microprojectile bombardment | 60 | 22 | 7 | 5 |
| PHE0000311 | PMON72458 | Microprojectile bombardment | 74 | 35 | 15 | 11 |
| PHE0000312 | PMON72456 | Microprojectile bombardment | 67 | 24 | 12 | 9 |
| PHE0000313 | PMON68378 | Microprojectile bombardment | 79 | 23 | 7 | 7 |
| PHE0000314 | PMON68379 | Microprojectile bombardment | 82 | 11 | 6 | 5 |
| PHE0000315 | PMON68381 | Microprojectile bombardment | 165 | 39 | 22 | 19 |
| PHE0000316 | PMON68382 | Microprojectile bombardment | 188 | 30 | 16 | 9 |
| PHE0000317 | PMON68380 | Microprojectile bombardment | 142 | 50 | 14 | 12 |
| PHE0000322 | PMON74403 | Microprojectile bombardment | 110 | 24 | 7 | 7 |
| PHE0000323 | PMON68400 | Agrobacterium | 167 | 27 | 1 | |
| PHE0000324 | PMON73162 | Microprojectile bombardment | 46 | 21 | 11 | 11 |
| PHE0000325 | PMON68384 | Microprojectile bombardment | 64 | 24 | 10 | 8 |
| PHE0000326 | PMON72463 | Microprojectile bombardment | 50 | 31 | 11 | 9 |
| PHE0000327 | PMON69481 | Microprojectile bombardment | 68 | 32 | 16 | 14 |
| PHE0000328 | PMON74416 | Microprojectile bombardment | 134 | 22 | 14 | 14 |
| PHE0000330 | PMON73164 | Microprojectile bombardment | 121 | 25 | 9 | 8 |
| PHE0000332 | PMON68385 | Microprojectile bombardment | 29 | 10 | 3 | 2 |
| PHE0000333 | PMON75470 | Microprojectile bombardment | 52 | 8 | 4 | 2 |
| PHE0000334 | PMON68395 | Agrobacterium | 328 | 68 | 4 | 4 |
| PHE0000335 | PMON74413 | Microprojectile bombardment | 164 | 24 | 12 | 7 |
| PHE0000336 | PMON74414 | Microprojectile bombardment | 177 | 41 | 25 | 22 |
| PHE0000338 | PMON68628 | Microprojectile bombardment | 149 | 32 | 25 | 22 |
| PHE0000339 | PMON68627 | Microprojectile bombardment | 21 | 7 | | |
| PHE0000339 | PMON75490 | Microprojectile bombardment | 60 | 4 | 1 | |
| PHE0000340 | PMON68629 | Microprojectile bombardment | 116 | 25 | 14 | 13 |
| PHE0000341 | PMON68397 | Agrobacterium | 14 | | | |
| PHE0000344 | PMON73163 | Microprojectile bombardment | 54 | 23 | 9 | 8 |
| PHE0000345 | PMON74411 | Microprojectile bombardment | 158 | 30 | 23 | 18 |
| PHE0000346 | PMON73165 | Microprojectile bombardment | 180 | 32 | 10 | 7 |
| PHE0000347 | PMON68386 | Microprojectile bombardment | 190 | 33 | 22 | 17 |
| PHE0000348 | PMON68387 | Microprojectile bombardment | 79 | 33 | 22 | 17 |
| PHE0000349 | PMON68389 | Microprojectile bombardment | 102 | 34 | 15 | 11 |
| PHE0000350 | PMON74410 | Microprojectile bombardment | 114 | 25 | 15 | 14 |
| PHE0000352 | PMON74409 | Microprojectile bombardment | 66 | 28 | 16 | 14 |
| PHE0000353 | PMON73160 | Microprojectile bombardment | 132 | 54 | 12 | 9 |
| PHE0000356 | PMON72464 | Microprojectile bombardment | 144 | 40 | 10 | 8 |
| PHE0000357 | PMON69474 | Microprojectile bombardment | 98 | 20 | 4 | 4 |
| PHE0000358 | PMON69475 | Microprojectile bombardment | 44 | 16 | 8 | 7 |
| PHE0000359 | PMON69476 | Microprojectile bombardment | 7 | 1 | 1 | 1 |
| PHE0000372 | PMON72460 | Microprojectile bombardment | 88 | 28 | 14 | 14 |
| PHE0000382 | PMON74401 | Microprojectile bombardment | 40 | 27 | 10 | 9 |
| PHE0000386 | PMON67834 | Microprojectile bombardment | 145 | 39 | 29 | 26 |
| PHE0000390 | PMON67836 | Microprojectile bombardment | 20 | 11 | 4 | 4 |
| PHE0000391 | PMON67835 | Microprojectile bombardment | 39 | 15 | 9 | 5 |
| PHE0000392 | PMON76335 | Microprojectile bombardment | 50 | 20 | | |
| PHE0000395 | PMON67840 | Microprojectile bombardment | 71 | 27 | 15 | 12 |
| PHE0000396 | PMON67838 | Microprojectile bombardment | 58 | 29 | 16 | 14 |
| PHE0000397 | PMON67839 | Microprojectile bombardment | 99 | 24 | 5 | 4 |
| PHE0000398 | PMON72488 | Microprojectile bombardment | 224 | 5 | 2 | 2 |
| PHE0000399 | PMON72485 | Microprojectile bombardment | | | | |
| PHE0000400 | PMON72486 | Microprojectile bombardment | 5 | | | |
| PHE0000401 | PMON67837 | Microprojectile bombardment | 53 | 18 | 13 | 13 |
| PHE0000402 | PMON67833 | Microprojectile bombardment | 52 | 13 | 5 | 3 |
| PHE0000403 | PMON67831 | Microprojectile bombardment | 39 | 18 | 6 | 6 |
| PHE0000404 | PMON67832 | Microprojectile bombardment | 19 | 9 | 1 | 1 |
| PHE0000411 | PMON68614 | Agrobacterium | 4 | | | |
| PHE0000412 | PMON67843 | Microprojectile bombardment | 42 | 30 | 19 | 10 |
| PHE0000413 | PMON67844 | Microprojectile bombardment | 124 | 30 | 16 | 13 |
| PHE0000414 | PMON67845 | Microprojectile bombardment | 80 | 28 | 14 | 9 |
| PHE0000415 | PMON67846 | Microprojectile bombardment | 105 | 25 | 15 | 11 |
| PHE0000416 | PMON67847 | Microprojectile bombardment | 30 | 11 | 4 | 4 |
| PHE0000418 | PMON69497 | Microprojectile bombardment | 144 | 26 | 18 | 16 |
| PHE0000419 | PMON67848 | Microprojectile bombardment | 143 | 26 | 21 | 16 |
| PHE0000420 | PMON74415 | Microprojectile bombardment | 85 | 28 | 10 | 8 |
| PHE0000423 | PMON72497 | Microprojectile bombardment | 77 | 22 | 16 | 8 |
| PHE0000425 | PMON72495 | Microprojectile bombardment | 84 | 19 | 3 | 3 |
| PHE0000426 | PMON74408 | Microprojectile bombardment | 48 | 21 | 17 | 14 |
| PHE0000428 | PMON74417 | Microprojectile bombardment | 80 | 29 | 14 | 14 |
| PHE0000429 | PMON74418 | Microprojectile bombardment | 97 | 20 | 8 | 6 |
| PHE0000433 | PMON74424 | Microprojectile bombardment | 27 | 4 | 1 | 1 |
| PHE0000434 | PMON74419 | Microprojectile bombardment | 60 | 7 | 3 | 3 |
| PHE0000435 | PMON75499 | Microprojectile bombardment | 64 | 4 | | |
| PHE0000437 | PMON68630 | Microprojectile bombardment | 144 | 31 | 17 | 15 |
| PHE0000439 | PMON74425 | Microprojectile bombardment | 7 | | | |
| PHE0000440 | PMON72473 | Microprojectile bombardment | 97 | 22 | 13 | 11 |
| PHE0000441 | PMON72474 | Microprojectile bombardment | 130 | 35 | 20 | 12 |
| PHE0000445 | PMON74426 | Microprojectile bombardment | | | | |
| PHE0000451 | PMON72475 | Microprojectile bombardment | 133 | | | |
| PHE0000452 | PMON72476 | Microprojectile bombardment | 110 | 12 | 8 | 6 |
| PHE0000454 | PMON72477 | Microprojectile bombardment | 130 | 25 | 12 | 9 |
| PHE0000469 | PMON68636 | Microprojectile bombardment | 80 | 26 | 17 | 16 |
| PHE0000471 | PMON73772 | Microprojectile bombardment | 74 | 31 | 8 | |
| PHE0000473 | PMON75471 | Microprojectile bombardment | 21 | 7 | 3 | 2 |
| PHE0000485 | PMON69498 | Microprojectile bombardment | 56 | 24 | 15 | 15 |
| PHE0000486 | PMON69496 | Microprojectile bombardment | 63 | 25 | 7 | 6 |

### Example 10

[0744] Isolation of Nucleic Acids from Plants

[0745] Nucleic acids were isolated from leaf tissue of R0 plants, collected and flash frozen in a 96 well collection box, 0 to 2 weeks after plantlets were transferred to soil. Approximately 100 milligrams of tissue was collected from each plant and stored at −80° C. until analysis.

[0746] DNA and RNA were isolated from a single tissue sample using the Qiagen RNeasy 96™ kit (Qiagen Inc., Valencia, Calif.) with modifications. One hundred milligrams of frozen tissue was homogenized in 700 μL RNeasy™ RTL buffer (Qiagen Inc., Valencia, Calif.) using a Bead Beater™ (Biospec Products, Bartlesville, Okla.). Samples were centrifuged at 3200 rpm for 15 minutes and all of the supernatant transferred the wells of a Promega WIZARD™ clearing plate (Promega Corporation, Madison, Wis.). The sample solutions were clarified by vacuum filtration through the clearing plate. The cleared supernatant was used for nucleic acid extractions.

[0747] For DNA extractions, 70 μL of the cleared sample was transferred to a v-well PCR plate, covered with adhesive foil, and heated to 95° C. for 8 minutes. The samples were incubated at 0° C. for five minutes, followed by centrifugation for 3 minutes to remove insoluble materials. A Sephadex G-50 gel filtration box (Edge Biosystems, Gaithersburg, Mo.) was conditioned for 2 min at 2000 rpm. Forty μL of the heat-treated supernatant was loaded into each well and the box centrifuged for two minutes at 2500 rpm. An additional 20 μL of TE buffer was added to the column effluent and the sample plate was stored at −20° C. until analysis.

[0748] For RNA extractions, five hundred microliters of cleared solution was transfer to a clean 96 well sample box. Two hundred and fifty microliters of 100% ethanol was added to each sample and the sample was thoroughly mixed. All of the approximately seven hundred and fifty microliters of solution was then loaded into the wells of a Qiagen RNeasy™ binding plate in a Promega WIZARD™ filtation unit. Five hundred microliters of RW1 buffer (Qiagen Inc., Valencia, Calif.) was added to each well and the buffer removed by vacuum filtration. Eighty microliters of RNAase free DNAase (Qiagen Inc., Valencia, Calif.) was added to each well, incubated at room temperature for 15 minutes the DNAase solution drawn through the wells by vacuum filteration. An additional five hundred microliters RW1 buffer (Qiagen Inc., Valencia, Calif.) was added to the wells and the buffer removed by vacuum filtration. The sample was further washed by vacuum filtration with 500 μL RPE buffer 2× (Qiagen, Valencia, Calif.). The extraction plate was placed on a microtiter plate and centrifuged for three minutes at 3000 rpm to remove any residual RPE buffer solution in the filter. Eighty microliters of RNA grade water (DNAse free) was added to each well, followed by incubation at room temperature for two minutes. The extraction plate and microtiter plate were centrifuged for three minutes at 3000 rpm and the RNA preparation stored frozen in the collection plate at −80° C.

### Example 11

[0749] Assays for Copy Number

[0750] Copy number of transgenes in R0 plants was determined using TAQMAN® methods. The pMON65154 and pRG76 GATEWAY™ destination vectors were constructed with a sequence derived from the 3′ region of the potato pinII gene which could be used to assay copy number of transgene insertions. The pinII forward and reverse primers were as follows:

| | | |
|---|---|---|
| Forward primer | 5′ ccccaccctgcaatgtga 3′ | (SEQ ID NO:737) |
| Reverse primer | 5′ tgtgcatccttttatttcatacattaattaa 3′ | (SEQ ID NO:738) |

The pinII TAQMAN ® probe sequence was
5′ cctagacttgtccatcttctggattggcca 3′

[0751] The probe was labelled at the 5′ end with the fluorescent dye FAM (6-carboyxfluorescein) and the quencher dye TAMRA (6-carboxy-N,N,N′,N′-tetramethylrhodamine) was attached via a linker to the 3′ end of the probe. The TAQMAN® probe was obtained from Applied Biosystems (Foster City, Calif.). SAT, a single copy maize gene was used as an internal control in TAQMAN® copy number assays. The SAT primers were as follows:

| | |
|---|---|
| Forward primer | |
| 5 ′gcctgccgcagaccaa 3′ | (SEQ ID NO:739) |
| Reverse primer | |
| 5′ atgcagagctcagcttcatc 3′ | (SEQ ID NO:740) |

The SAT TAQMAN ® probe sequence was

| | |
|---|---|
| 5′ tccagtacgtgcagtccctcctcc 3′ | (SEQ ID NO:741) |

[0752] the probe was labelled at its 5′ end with the fluorescent dye VIC™ (Applied Biosystems, Foster City, Calif.) and the quencher dye TAMRA at is 3′end.

[0753] TAQMAN® PCR was performed according to the manufacturer's instructions (Applied Biosystems, Foster City, Calif.). Five to 100 nanograms DNA was used in each assay. PCR amplification and TAQMAN® probe detection were performed in 1× TAQMAN® Universal PCR Master Mix (Applied Biosystems, Foster City, Calif.) which contains AmpliTaq Gold® DNA polymerase, AmpErase® UNG, dNTPs with dUTP, Passive Reference 1, and optimized buffer. Eight hundred nM each forward and reverse pinII primers and 150 nM pinII TAQMAN® probe were used in the TAQMAN® assay. 200 nM each Sat forward and reverse primers and 150 nM Sat TAQMAN® probe were used in the TAQMAN® copy number assay. TAQMAN® PCR was carried out for 2 minutes at 50° C., 10 minutes at 95° C, followed by 40 cycles of 15 seconds at 95° C. and one minute at 60° C. Real time TAQMAN® probe fluorescence was measured using an ABI Prism 7700 Sequence Detection System or ABI7900HT Sequence Detection System (Applied Biosystems, Foster City, Calif.). C_{T} values were calculated according to the TAQMAN® EZ RT-PCR kit instruction manual (Applied Biosystems, Foster City, Calif.). The ΔΔ C_{T} value was calculated as C_{T} (internal control gene (Sat))—C_{T} (transgene)—C_{T} (internal control gene (Sat) in nontransgenic plant). The copy number was assigned as follows according to the following.

| Copy Number | Criteria |
|---|---|
| 1 | −0.5 < ^{ΔΔC}_{T} < 0.50 |
| 2 | 0.5 < ^{ΔΔC}_{T} < 1.50 |
| >2 | ^{ΔΔC}_{T} > 1.50 |

[0754] Plants comprising genes of the present invention were anyalyzed by TAQMAN® methods for copy number. Copy number in plants containing various genes of the present invention is summarized in Table 5 below.

TABLE 5

| | | Number of | Number 0 | 1-2 Copy | Number of Plants |
|---|---|---|---|---|---|
| PHE_ID | pMON No | Plants Assayed | Copy Plants | Plants | Expressing |
| PHE0000006 | PMON68861 | 45 | 2 | 16 | 12 |
| PHE0000009 | PMON67803 | 17 | 2 | 7 | 7 |
| PHE0000010 | PMON67800 | 41 | 1 | 28 | 23 |
| PHE0000012 | PMON67808 | 37 | 5 | 23 | 26 |
| PHE0000012 | PMON67806 | 20 | 5 | 10 | 11 |
| PHE0000013 | PMON69452 | 53 | 12 | 24 | 30 |
| PHE0000013 | PMON69451 | 38 | 3 | 25 | 18 |
| PHE0000016 | PMON67750 | 8 | 7 | 1 | 2 |
| PHE0000017 | PMON68850 | 20 | 5 | 11 | 10 |
| PHE0000022 | PMON67826 | 26 | 3 | 12 | 12 |
| PHE0000024 | PMON68354 | 51 | 11 | 35 | 8 |
| PHE0000024 | PMON68354 | 51 | 11 | 35 | 8 |
| PHE0000034 | PMON67805 | 30 | 4 | 11 | 13 |
| PHE0000038 | PMON68383 | 11 | 4 | 3 | 2 |
| PHE0000039 | PMON67807 | 22 | 6 | 10 | 7 |
| PHE0000040 | PMON67801 | 13 | | 5 | 9 |
| PHE0000051 | PMON68859 | 20 | | 13 | 15 |
| PHE0000052 | PMON67813 | 45 | 8 | 20 | 23 |
| PHE0000055 | PMON68355 | 33 | 3 | 23 | 28 |
| PHE0000056 | PMON68364 | 31 | 5 | 18 | 16 |
| PHE0000057 | PMON68350 | 33 | 3 | 14 | 19 |
| PHE0000058 | PMON68351 | 27 | 5 | 11 | 15 |
| PHE0000059 | PMON68370 | 20 | 2 | 10 | 17 |
| PHE0000060 | PMON68356 | 18 | 2 | 15 | 13 |
| PHE0000064 | PMON67804 | 9 | | 4 | 7 |
| PHE0000067 | PMON67816 | 36 | 4 | 21 | 24 |
| PHE0000068 | PMON67824 | 2 | | 2 | |
| PHE0000069 | PMON67821 | 17 | 6 | 5 | 7 |
| PHE0000070 | PMON67825 | 49 | 3 | 21 | 28 |
| PHE0000072 | PMON67828 | 19 | 8 | 9 | 2 |
| PHE0000073 | PMON68357 | 23 | 3 | 16 | 15 |
| PHE0000074 | PMON68352 | 17 | 5 | 8 | 7 |
| PHE0000076 | PMON68851 | 18 | | 13 | 5 |
| PHE0000077 | PMON67827 | 25 | 3 | 10 | 13 |
| PHE0000079 | PMON67752 | 33 | 7 | 14 | 23 |
| PHE0000086 | PMON67812 | 36 | 3 | 16 | 24 |
| PHE0000091 | PMON68358 | 12 | 1 | 9 | 7 |
| PHE0000092 | PMON68359 | 17 | 1 | 12 | 8 |
| PHE0000098 | PMON73168 | 16 | 4 | 7 | 7 |
| PHE0000102 | PMON67815 | 12 | 1 | 8 | 2 |
| PHE0000104 | PMON68608 | 24 | 1 | 11 | 22 |
| PHE0000106 | PMON69457 | 16 | 1 | 7 | 12 |
| PHE0000108 | PMON67849 | 18 | 1 | 11 | 16 |
| PHE0000114 | PMON68361 | 12 | 4 | 6 | 6 |
| PHE0000115 | PMON68362 | 2 | 2 | | |
| PHE0000116 | PMON68367 | 30 | 3 | 15 | 9 |
| PHE0000117 | PMON68368 | 21 | 7 | 10 | 12 |
| PHE0000118 | PMON67811 | 13 | 2 | 2 | 5 |
| PHE0000119 | PMON68363 | 21 | 3 | 16 | 5 |
| PHE0000120 | PMON68853 | 18 | 2 | 12 | 10 |
| PHE0000121 | PMON68854 | 26 | 3 | 12 | 25 |
| PHE0000122 | PMON74402 | 17 | 5 | 11 | 10 |
| PHE0000123 | PMON68855 | 21 | 4 | 16 | 12 |
| PHE0000124 | PMON68856 | 24 | | 17 | 20 |
| PHE0000125 | PMON68369 | 63 | 8 | 24 | 39 |
| PHE0000126 | PMON69458 | 21 | 4 | 13 | 14 |
| PHE0000127 | PMON68887 | 26 | 2 | 13 | 19 |
| PHE0000133 | PMON68860 | 63 | 6 | 33 | 37 |
| PHE0000153 | PMON67817 | 44 | 5 | 25 | 28 |
| PHE0000154 | PMON67818 | 29 | 3 | 21 | 21 |
| PHE0000158 | PMON73169 | 24 | 3 | 5 | 12 |
| PHE0000160 | PMON75485 | 1 | | 1 | 1 |
| PHE0000162 | PMON75488 | 7 | 2 | 4 | 6 |
| PHE0000164 | PMON73170 | 23 | 5 | 6 | 13 |
| PHE0000168 | PMON68857 | 25 | 1 | 13 | 18 |
| PHE0000173 | PMON73171 | 22 | 6 | 6 | 10 |
| PHE0000176 | PMON68388 | 22 | 4 | 10 | 18 |
| PHE0000177 | PMON68881 | 15 | 6 | 6 | 7 |
| PHE0000178 | PMON73166 | 10 | 1 | 9 | 4 |
| PHE0000179 | PMON69467 | 9 | 4 | 5 | 4 |
| PHE0000182 | PMON74420 | 13 | 2 | 6 | 6 |
| PHE0000185 | PMON69468 | 20 | 10 | 7 | 3 |
| PHE0000186 | PMON69460 | 22 | 6 | 12 | 15 |
| PHE0000188 | PMON73167 | 37 | 7 | 23 | 22 |
| PHE0000192 | PMON68394 | 2 | | 2 | 2 |
| PHE0000193 | PMON68889 | 12 | 1 | 8 | 10 |
| PHE0000219 | PMON68865 | 15 | 6 | 7 | 8 |
| PHE0000220 | PMON74434 | 19 | | 12 | 19 |
| PHE0000223 | PMON69478 | 34 | 4 | 7 | 6 |
| PHE0000227 | PMON68376 | 34 | 3 | 14 | 19 |
| PHE0000231 | PMON72498 | 25 | 2 | 10 | 22 |
| PHE0000232 | PMON68895 | 17 | 4 | 7 | 13 |
| PHE0000235 | PMON73161 | 9 | 1 | 6 | 4 |
| PHE0000237 | PMON68891 | 22 | 6 | 11 | 18 |
| PHE0000238 | PMON69466 | 26 | 8 | 13 | 9 |
| PHE0000239 | PMON72466 | 29 | 5 | 17 | 21 |
| PHE0000240 | PMON72468 | 16 | 4 | 7 | 11 |
| PHE0000242 | PMON72470 | 22 | 6 | 8 | 10 |
| PHE0000243 | PMON72467 | 19 | 2 | 11 | 17 |
| PHE0000244 | PMON68372 | 31 | 5 | 20 | 13 |
| PHE0000245 | PMON68373 | 22 | 3 | 10 | 19 |
| PHE0000246 | PMON68374 | 45 | 8 | 22 | 17 |
| PHE0000247 | PMON68375 | 28 | 5 | 11 | 15 |
| PHE0000249 | PMON74422 | 18 | 7 | 7 | 11 |
| PHE0000252 | PMON74407 | 28 | 6 | 16 | 18 |
| PHE0000254 | PMON73172 | 16 | 5 | 10 | 2 |
| PHE0000255 | PMON72459 | 27 | 3 | 20 | 22 |
| PHE0000256 | PMON75302 | 1 | 1 | | 1 |
| PHE0000258 | PMON68371 | 34 | 3 | 15 | 20 |
| PHE0000259 | PMON74404 | 24 | 1 | 12 | 19 |
| PHE0000262 | PMON68892 | 8 | 5 | 1 | 3 |
| PHE0000263 | PMON74412 | 19 | | 17 | 17 |
| PHE0000264 | PMON68866 | 21 | 4 | 15 | 5 |
| PHE0000265 | PMON69469 | 4 | 3 | 1 | 2 |
| PHE0000266 | PMON69470 | 16 | 8 | 5 | 4 |
| PHE0000267 | PMON68867 | 22 | 5 | 14 | 7 |
| PHE0000273 | PMON74423 | 2 | 1 | 1 | 1 |
| PHE0000276 | PMON68868 | 35 | 4 | 15 | 17 |
| PHE0000277 | PMON68890 | 16 | 1 | 11 | 8 |
| PHE0000278 | PMON68886 | 24 | | 17 | 18 |
| PHE0000279 | PMON68896 | 35 | 3 | 19 | 24 |
| PHE0000280 | PMON72451 | 22 | 10 | 7 | 14 |
| PHE0000281 | PMON72452 | 1 | | 1 | 1 |
| PHE0000283 | PMON69472 | 14 | | 3 | 5 |
| PHE0000287 | PMON68898 | 29 | 6 | 16 | 19 |
| PHE0000291 | PMON72455 | 24 | 3 | 11 | 15 |
| PHE0000292 | PMON68888 | 26 | 3 | 20 | 20 |
| PHE0000294 | PMON68897 | 14 | 3 | 6 | 9 |
| PHE0000295 | PMON68894 | 33 | 5 | 12 | 16 |
| PHE0000296 | PMON68893 | 5 | 1 | 1 | 2 |
| PHE0000297 | PMON68899 | 16 | 1 | 9 | 11 |
| PHE0000299 | PMON68875 | 8 | | 6 | 7 |
| PHE0000300 | PMON68876 | 18 | 6 | 8 | 10 |
| PHE0000301 | PMON68877 | 24 | 2 | 17 | 16 |
| PHE0000302 | PMON68878 | 25 | 6 | 12 | 2 |
| PHE0000304 | PMON68873 | 34 | 7 | 21 | 19 |
| PHE0000305 | PMON68880 | 27 | 9 | 11 | 10 |
| PHE0000306 | PMON68882 | 29 | 6 | 15 | 22 |
| PHE0000307 | PMON68883 | 19 | 5 | 12 | 15 |
| PHE0000308 | PMON68884 | 34 | 5 | 18 | 20 |
| PHE0000309 | PMON68885 | 11 | 2 | 8 | 9 |
| PHE0000310 | PMON68377 | 22 | 6 | 8 | 10 |
| PHE0000311 | PMON72458 | 25 | 3 | 13 | 16 |
| PHE0000312 | PMON72456 | 21 | 4 | 7 | 16 |
| PHE0000313 | PMON68378 | 14 | | 9 | 5 |
| PHE0000314 | PMON68379 | 7 | | 3 | 7 |
| PHE0000315 | PMON68381 | 36 | 7 | 15 | 30 |
| PHE0000316 | PMON68382 | 21 | 3 | 8 | 16 |
| PHE0000317 | PMON68380 | 40 | 7 | 7 | 24 |
| PHE0000322 | PMON74403 | 21 | 3 | 8 | 16 |
| PHE0000324 | PMON73162 | 14 | 2 | 9 | 12 |
| PHE0000325 | PMON68384 | 19 | 1 | 7 | 16 |
| PHE0000326 | PMON72463 | 27 | 3 | 12 | 12 |
| PHE0000327 | PMON69481 | 24 | 3 | 17 | 22 |
| PHE0000328 | PMON74416 | 15 | 3 | 11 | 10 |
| PHE0000330 | PMON73164 | 23 | 4 | 9 | 15 |
| PHE0000332 | PMON68385 | 7 | 1 | 6 | 6 |
| PHE0000333 | PMON75470 | 1 | | 1 | 1 |
| PHE0000334 | PMON68395 | 5 | 1 | | 5 |
| PHE0000335 | PMON74413 | 15 | 3 | 6 | 13 |
| PHE0000336 | PMON74414 | 34 | 5 | 20 | 27 |
| PHE0000338 | PMON68628 | 26 | 6 | 9 | 14 |
| PHE0000339 | PMON68627 | 5 | | 4 | 2 |
| PHE0000340 | PMON68629 | 22 | 2 | 9 | 16 |
| PHE0000344 | PMON73163 | 20 | 1 | 13 | 18 |
| PHE0000345 | PMON74411 | 28 | 2 | 8 | 23 |
| PHE0000346 | PMON73165 | 26 | 3 | 6 | 15 |
| PHE0000347 | PMON68386 | 32 | 4 | 20 | 29 |
| PHE0000348 | PMON68387 | 27 | 2 | 21 | 20 |
| PHE0000349 | PMON68389 | 29 | 3 | 16 | 19 |
| PHE0000350 | PMON74410 | 18 | 1 | 17 | 13 |
| PHE0000352 | PMON74409 | 24 | 5 | 13 | 21 |
| PHE0000353 | PMON73160 | 38 | 10 | 21 | 24 |
| PHE0000356 | PMON72464 | 29 | 6 | 12 | 16 |
| PHE0000357 | PMON69474 | 9 | | 4 | 4 |
| PHE0000358 | PMON69475 | 14 | 1 | 12 | 2 |
| PHE0000359 | PMON69476 | 1 | | | 1 |
| PHE0000372 | PMON72460 | 24 | 3 | 13 | 20 |
| PHE0000382 | PMON74401 | 20 | | 13 | 18 |
| PHE0000386 | PMON67834 | 32 | 2 | 5 | 2 |
| PHE0000390 | PMON67836 | 10 | 1 | 4 | 8 |
| PHE0000391 | PMON67835 | 7 | 2 | 4 | 3 |
| PHE0000395 | PMON67840 | 18 | 2 | 9 | 15 |
| PHE0000396 | PMON67838 | 22 | 4 | 8 | 16 |
| PHE0000397 | PMON67839 | 22 | 7 | 11 | 13 |
| PHE0000398 | PMON72488 | 4 | 1 | 1 | 2 |
| PHE0000401 | PMON67837 | 13 | | 7 | 11 |
| PHE0000402 | PMON67833 | 5 | 1 | 3 | 3 |
| PHE0000403 | PMON67831 | 11 | 1 | 4 | 9 |
| PHE0000404 | PMON67832 | 6 | | 5 | 1 |
| PHE0000412 | PMON67843 | 27 | 2 | 17 | 21 |
| PHE0000413 | PMON67844 | 23 | 3 | 6 | 17 |
| PHE0000414 | PMON67845 | 16 | 4 | 9 | 10 |
| PHE0000415 | PMON67846 | 22 | 2 | 15 | 17 |
| PHE0000416 | PMON67847 | 9 | 2 | 4 | 6 |
| PHE0000418 | PMON69497 | 19 | 2 | 7 | 15 |
| PHE0000419 | PMON67848 | 24 | 4 | 2 | 5 |
| PHE0000420 | PMON74415 | 18 | 2 | 8 | 16 |
| PHE0000423 | PMON72497 | 19 | 2 | 12 | 19 |
| PHE0000425 | PMON72495 | 6 | | 4 | 5 |
| PHE0000426 | PMON74408 | 15 | | 8 | 14 |
| PHE0000428 | PMON74417 | 15 | 2 | 8 | 12 |
| PHE0000429 | PMON74418 | 15 | 2 | 4 | 13 |
| PHE0000433 | PMON74424 | 3 | 2 | 1 | 1 |
| PHE0000434 | PMON74419 | 6 | 1 | 3 | 4 |
| PHE0000437 | PMON68630 | 23 | 2 | 8 | 19 |
| PHE0000440 | PMON72473 | 18 | 2 | 10 | 15 |
| PHE0000441 | PMON72474 | 29 | 5 | 13 | 23 |
| PHE0000452 | PMON72476 | 12 | 3 | 3 | 10 |
| PHE0000454 | PMON72477 | 17 | 2 | 9 | 15 |
| PHE0000469 | PMON68636 | 20 | | 3 | 16 |
| PHE0000473 | PMON75471 | 1 | | 1 | 1 |
| PHE0000485 | PMON69498 | 19 | 3 | 9 | 17 |
| PHE0000486 | PMON69496 | 14 | 1 | 8 | 8 |

### Example 12

[0755] Assays for Gene Expression

[0756] Expression of a transgene of the present invention was assayed by TAQMAN® RT-PCR using the TAQMAN® EZ RT-PCR kit from Applied Biosystems (Foster City, Calif.). RNA expression was assyed relative to expression in a transgenic standard, a transgenic maize event designated DBT418, comprising a B. thuringiensis cryIA(c) gene operably linked to a pinII 3′ untranslated region. The DBT418 event expresses the cryIA(c) gene at a level which confers commercial levels of resistance to lepdiopteran insects such as Europeani Corn Borer and was commercially sold by DEKALB Genetics Corporation under the brand name DEKALBt®. The pMON65154 and pRG76 GATEWAY™ destination vectors were constructed with a sequence derived from the 3′ region of the potato pinII gene which could be used to assay transgene transcript levels for any coding sequence inserted into the Destination Vector. The pinII primers and probe described in Example 11 were used for TAQMAN® RT-PCR. Ubiquitin fusion protein (UBI) RNA was used as an internal control in all TAQMAN® RT-PCR assays. The UBI primers used were as follows:

| | |
|---|---|
| Forward primer | |
| 5′ cgtctacaatcagaaggcgtaatc 3′ | (SEQ ID NO:743) |
| Reverse primer | |
| 5′ ccaacaggtgaatgcttgatagg 3′ | (SEQ ID NO:744) |

The sequence of the UBI TAQMAN ® probe was

| | |
|---|---|
| 5′ catgcgccgctttgcttc 3′ | (SEQ ID NO:745) |

[0757] The UBI TAQMAN® probe was labelled at its 5′ end with the fluorescent dye VIC™ (Applied Biosystems, Foster City, Calif.) and the quencher dye TAMRA at is 3′ end Reverse transcription, PCR amplification and TAQMAN® probing were performed according to the one step procedure described in the TAQMAN® EZ RT-PCR kit (Applied Biosystems, Foster City, Calif.). Five to 100 nanograms total RNA was used in each assay. In vitro transcribed control RNA from the DBT418 event was included as a control on every plate and run over a concentration range from 0.01 picograms to 10 picograms. Total RNA from DBT418 leaf and from the non-transgenic inbred LH59 were run as positive and negative controls respectively. RT-PCR was performed in TAQMAN® EZ Buffer (50 mM Bicine, 115 mM potassium acetate, 0.01 mM EDTA, 60 mM Passive Reference 1, 8% glycerol, pH 8.2, Applied Biosystems, Foster City, Calif.) containing 3 mM manganese acetate, 300 μM each dATP, dCTP, dGTP, and dUTP, 100 units rTth™ (Applied Biosystems, Foster City, Calif.) DNA polymerase, and 25 units AmpErase UNG (Applied Biosytems, Foster City, Calif.). RT-PCR was carred out as follows: 2 minutes at 50° C, 30 minutes at 60° C., 5 minutes at 95° C., followed by 40 cycles of 20 seconds at 95° C. and 1 minute at 60° C. 400 nM each forward and reverse primers were used for amplification of the pinII sequence and 200 nM TAQMAN® pinII probe used for detection. UBI RNA was amplified using 400 nM each forward and reverse primers and 200 nM UBI TAQMAN® probe was used for detection. TAQMAN® fluorescence was measured using an ABI Prism 7700 Sequence Detection System or ABI7900HT Sequence Detection System (Applied Biosystems, Foster City, Calif.). The C_{T} and ΔΔC_{T} values were calculated as described in Example 11. Expression of transgenes of the present invention was quantitated relative to transgene expression in DBT418 and reported as a ratio of transgene expression to DBT418 expression, i.e., 2^{-(ΔΔC}^{_{T}}⁾ (transgene)/2^{-(ΔΔC}^{_{T}}⁾ (DBT418). Expression of various genes of the present invention in maize is summarized in Table 5.

### Example 13

[0758] Phenotype Evaluation

[0759] For each plant representing a transgenic event, F1 seed was planted in a field producing plants which were assayed for phenotype and for the selectable kanamycin resistant marker. Each of the plants were self pollinated to produce F2 seed. Seed from nptII-positive plants, e.g. a few ears from each transgenic event, was planted and grown to produce F2 plants which were assayed for phenotype and kanamycin resistance. Kanamycin-resistant F2 plants were self pollinated to produce F3 seed. F3 seed was screened for complete resistance to kanamycin indicating a homozygous transgene. Seeds from homozygous F3 ears were planted in the field to produce F3 plants which were self pollinated to produce P4 seed. F3 plants were also crossed to tester inbred lines to produce F1 hybrid transgenic seed. Phenotypes such as yield are determined from F1 hybrid transgenic seed; other phenotypes can be determined from either F1 hybrid transgenic lines or F1, F2, F3 or F4 inbred transgenic lines.

[0760] A variety of transgenic plants were grown in field conditions allowing observation of multiple events of the unexpected phenotypes listed in Table 6 below. See also Applicants' copending PCT patent application entitled “Transgenic Maize with Enhanced Phenotype” filed Dec. 4, 2002, the entirety of which application is incorporated herein by reference thereto.

TABLE 6

| Gene | | No. of | | Observed tissue | |
|---|---|---|---|---|---|
| Seq ID | Gene Name | events | Event | type | Observation results |
| 241 | corn SVP-like | 6 | ZM_M17107 | Tassel, central axis | Elongated |
| 241 | corn SVP-like | 6 | ZM_M17109 | Tassel, central axis | Elongated |
| 241 | corn SVP-like | 6 | ZM_M17113 | Tassel, central axis | elongated |
| 241 | corn SVP-like | 6 | ZM_M17114 | Tassel, central axis | elongated |
| 241 | corn SVP-like | 6 | ZM_M18338 | Tassel, floret, anther | no extrusion |
| 241 | corn SVP-like | 6 | ZM_M18350 | Stem, internode | increased length |
| 66 | Receiver domain (ARR2-like) | 5 | ZM_M15362 | Tassel, floret, anther | no extrusion |
| 66 | Receiver domain (ARR2-like) | 5 | ZM_M15363 | Tassel, floret, anther | no extrusion |
| 66 | Receiver domain (ARR2-like) | 5 | ZM_M15364 | Tassel, floret, anther | no extrusion |
| 66 | Receiver domain (ARR2-like) | 5 | ZM_M15365 | Tassel, floret, anther | no extrusion |
| 66 | Receiver domain (ARR2-like) | 5 | ZM_M16223 | Tassel, floret, anther | no extrusion |
| 68 | Receiver domain (TOC1-like) 3 | 4 | ZM_M12575 | Stem, internode | decreased length |
| 68 | Receiver domain (TOC1-like) 3 | 4 | ZM_M12576 | Stem, internode | decreased length |
| 68 | Receiver domain (TOC1-like) 3 | 4 | ZM_M12583 | Leaf, blade | interveinal chlorosis |
| 68 | Receiver domain (TOC1-like) 3 | 4 | ZM_M13665 | Stem, internode | Other - see notes |
| 71 | Receiver domain (RR3-like) 6 | 4 | ZM_M24601 | Tassel, floret, anther | no extrusion |
| 71 | Receiver domain (RR3-like) 6 | 4 | ZM_M24603 | Tassel, floret, anther | no extrusion |
| 71 | Receiver domain (RR3-like) 6 | 4 | ZM_M24623 | Tassel, floret, anther | no extrusion |
| 71 | Receiver domain (RR3-like) 6 | 4 | ZM_M24624 | Tassel, floret, anther | no extrusion |
| 197 | corn HY5-like | 2 | ZM_M16307 | Stem, internode | decreased length |
| 197 | corn HY5-like | 2 | ZM_M17106 | Stem, internode | decreased length |
| 165 | RNAse S | 2 | ZM_M24554 | Stem, internode | thin |
| 165 | RNAse S | 2 | ZM_M24557 | Leaf, complete | light green |
| 119 | soy HSF | 2 | ZM_M20417 | Stem, internode | decreased length |
| 119 | soy HSF | 2 | ZM_M20418 | Tassel, floret, anther | no extrusion |
| 14 | cytochrome P450 | 2 | ZM_M23446 | Leaf, blade | early senescence |
| 14 | cytochrome P450 | 2 | ZM_M23450 | Leaf, blade | early senescence |
| 3 | sorghum proline permease | 2 | ZM_M18655 | Stem, internode | decreased length |
| 3 | sorghum proline permease | 2 | ZM_M19446 | Leaf, complete | light green |
| 4 | rice AA transporter | 2 | ZM_M18625 | Plant, complete | delayed growth |
| 4 | rice AA transporter | 2 | ZM_M18626 | Tassel, floret | feminized-silk/seed |
| | | | | | formation |
| 203 | helix-loop-helix protein (PIF3 | 2 | ZM_M18452 | Tassel, central axis | shortened, increased |
| | | | | | girth |
| 203 | helix-loop-helix protein (PIF3 | 2 | ZM_M20549 | Tassel, central axis | shortened, increased |
| | | | | | girth |
| 349 | soy myb transcription factor | 7 | ZM_M24248 | Stem, internode | increased length |
| 349 | soy myb transcription factor | 7 | ZM_M24251 | Stem, internode | increased length |
| 349 | soy myb transcription factor | 7 | ZM_M24349 | Stem, internode | increased length |
| 349 | soy myb transcription factor | 7 | ZM_M24350 | Stem, internode | increased length |
| 349 | soy myb transcription factor | 7 | ZM_M24808 | Stem, internode | increased length |
| 349 | soy myb transcription factor | 7 | ZM_M24810 | Stem, internode | increased length |
| 349 | soy myb transcription factor | 7 | ZM_M24811 | Stem, internode | increased length |

[0761] All of the compositions and methods disclosed and claimed herein can be made and executed without undue experimentation in light of the present disclosure. While the compositions and methods of this invention have been described in terms of preferred embodiments, it will be apparent to those of skill in the art that variations may be applied to the compositions and methods and in the steps or in the sequence of steps of the methods described herein without departing from the concept, spirit and scope of the invention. More specifically, it will be apparent that certain agents which are both chemically and physiologically related may be substituted for the agents described herein while the same or similar results would be achieved. All such similar substitutes and modifications apparent to those skilled in the art are deemed to be within the spirit, scope and concept of the invention as defined by the appended claims.

[0762] References

[0763] U.S. Pat. No. 4,535,060. Inhibition resistant 5-enolpyruvyl-3-phosphoshikimate synthetase, production and use. Inventor(s): Comai, Luca.

[0764] U.S. Pat. No. 4,563,417. Nucleic acid hybridization assay employing antibodies to intercalation complexes. Inventor(s): Albarella, James P, Anderson, Leslie H D.

[0765] U.S. Pat. No. 4,582,789. N-substituted-4,9-dioxa-1,12-dodecanediamines useful for preparing nucleic acid intercalators. Inventor(s): Sheldon III, Edward Lewis, Levenson, Corey Howard, Mullis Kary Banks, Rapoport, Henry.

[0766] U.S. Pat. No. 4,959,317. Site-specific recombination of DNA in eukaryotic cells. Inventor(s):Sauer, Brian L.

[0767] U.S. Pat. No. 5,106,739. CaMv 355 enhanced mannopine synthase promoter and method for using same. Inventor(s): Comai, Luca, Moran, Paul M.

[0768] U.S. Pat. No. 5,254,801. Heterologous dominant conditional lethal gene which is a phosphonate monoester hydrolase and use thereof in plants. Inventor(s): Dotson, Stanton B, Kishore, Ganesh M.

[0769] U.S. Pat. No. 5,302,523. Transformation of plant cells. Inventor(s): Coffee, Ronald, Dunwell, James M.

[0770] U.S. Pat. No. 5,384,253. Genetic transformation of maize cells by electroporation of cells pretreated with pectin degrading enzymes. Inventor(s): Krzyzek, Richard A, Laursen, Cheryl, R M, Anderson, Paul C.

[0771] U.S. Pat. No. 5,464,765. Transformation of plant cells. Inventor(s): Coffee, Ronald, Dunwell, James M.

[0772] U.S. Pat. No. 550,318. Methods and compositions for the production of stably transformed, fertile monocot plants and cells thereof Inventor(s): Adams, Thomas R, Chambers, Sheryl A, Daines, Richard J, Gordon-Kamm, W J, Kausch, Albert P, Lemaux, Peggy G, Mackey, Catherine J, Mangano, Mary L, O'Brien, James V, Rice, Thomas B, Spencer, T Michael, Start, William G, Willetts, Nancy G.

[0773] U.S. Pat. No. 5,508,184. Process for transforming plant protoplast. Inventor(s): Negrutiu, loan, Potrykus, Ingo.

[0774] U.S. Pat. No. 5,508,468. Fertile transgenic corn plants. Inventor(s): Lundquist, Ronald C, Walters, David A, Kirihara, Julie A.

[0775] U.S. Pat. No. 5,510,471. Chimeric gene for the transformation of plants. Inventor(s): Lebrun, Michel, Leroux, Bernard, Sailland, Alain.

[0776] U.S. Pat. No. 5,527,695. Controlled modification of eukaryotic genomes. Inventor(s): Hodges, Thomas K, Lyznik, Leszed A.

[0777] U.S. Pat. No. 5,538,877. Method for preparing fertile transgenic corn plants. Inventor(s): Lundquist, Ronald C, Walters, David A.

[0778] U.S. Pat. No. 5,538,880. Method for preparing fertile transgenic corn plants. Inventor(s): Lundquist, Ronald C, Walters, David A.

[0779] U.S. Pat. No. 5,545,818. Expression of Bacillus thuringiensis cry proteins in plant plastids. Inventor(s): McBride, Kevin E, Maliga, Pal.

[0780] U.S. Pat. No. 5,550,318. Methods and compositions for the production of stably transformed, fertile monocot plants and cells thereof. Inventor(s): Chambers, Sheryl A, Gordon-Karmm, William J, Spencer T Michael, Rice, Thomas B, Adams Thomas R, Kausch, Albert P, LeMaux, Peggy G, Mangano, Mary L, O'Brien, James V, Start, William G, Daines, Richard J, Mackey, Catherine J, Willetts, Nancy G.

[0781] U.S. Pat. No. 5,563,055. Method of Agrobacterium-mediated transformation of cultured soybean cells. Inventor(s): Townsend, Jeffrey A, Thomas, Laurie A.

[0782] U.S. Pat. No. 5,591,616. Method of transforming monocotyledon. Inventor(s): Hiei, Yukou Japan Tobacco Inc P, Komari, Toshihiko Japan Tobacco.

[0783] U.S. Pat. No. 5,605,793. Methods for in vitro recombination. Inventor(s): Stemmer, Villem P C.

[0784] U.S. Pat. No. 5,627,061. Glyphosate-tolerant 5-enolpyruvylshikimate-3-phosphate synthases. Inventor(s): Barry, Gerard F, Kishore, Ganesh M, Padgette, Stephen R, Stallings, William C.

[0785] U.S. Pat. No. 5,658,772. Site-specific recombination of DNA in plant cells. Inventor(s): Hsu, Francis Chuoh, Russell, Sandra, Hoff, Sauer, Brian, Lee, Odell, Joan Tellefsen, Shen, Jennie Bih-Jien.

[0786] U.S. Pat. No. 5,728,925. Chimaeric gene coding for a transit peptide and a heterologous polypeptide. Inventor(s): Herrera-Estrella, Luis, Van Den Broeck, Buido, Van Montagu, Mark, Schell, Jeff, Schreier, Peter, Bohnert, Hans J, Kausch, Albert P, Timko, Michael P, Cashmore, Anthony R.

[0787] U.S. Pat. No. 5,780,708. Fertile transgenic corn plants. Inventor(s): Walters, David A, Lundquist, Ronald C.

[0788] U.S. Pat. No. 5,811,238. Methods for generating polynucleotides having desired characteristics by iterative selection and recombination. Inventor(s): Crameri, Andreas, Stemmer, Willem P C.

[0789] U.S. Pat. No. 5,830,721. DNA mutagenesis by random fragmentation and reassembly. Crameri, Andreas, Stemmer, Willem P C.

[0790] U.S. Pat. No. 5,837,458. Methods and compositions for cellular and metabolic engineering. Minshull, Jeremy, Stemmer, Willem P C.

[0791] U.S. Pat. No. 593,950. Production of enzymes having desired activities by mutagenesis. Inventor(s): Short, Jay M.

[0792] U.S. Pat. No. 5,965,408. Method of DNA reassembly by interrupting synthesis. Inventor(s): Short, Jay M.

[0793] U.S. Pat. No. 5,981,836: Plant plastid division genes. Inventor(s): Osteryoung; Katherine W, Reno, N V.

[0794] U.S. Pat. No. 5,981,840. Methods for agrobacterium-mediated transformation. Inventor(s): Cai, Tishu, Zhao, Zuo-Yu, Gu, Weining, Pierce, Dorothy A.

[0795] U.S. Pat. No. 6,118,047. Anthranilate synthase gene and method of use thereof for conferring tryptophan overproduction. Girffor, Matthew C, Chomet, Paul S, Kriz, Alan L, Anderson, Paul C.

[0796] U.S. Pat. No. 6,194,636. Maize RS324 promoter and methods for use thereof. McElroy, David, Laccetti, Lucille B, Orozco Jr, Emil M.

[0797] U.S. Pat. No. 6,207,879: Maize RS81 promoter and methods for use thereof. Inventor(s): McElroy, David, Orozco, Jr, Emil M, Laccetti, Lucille B.

[0798] WO 8402913. Chimeric genes suitable for expression in plant cells. Inventor(s): Rogers, Stephen G, Fraley, Robert T.

[0799] WO 9506128. Fertile, transgenic maize plants and methods for their production. Inventor(s): Gordon-Kamm, William J, Dams, Thomas R., Orr, Peter M, Anderson, Paul C, Kausch, Albert P, Daines, Richard J, Mackey, Catherine J, Orozoco, Emil M Jr, Stephens, Michael A.

[0800] WO 95/30005. Genes regulating the response of Zea mays to water deficit. Inventor(s): Chomet, Paul, Dellaporta, Stephen L., Orr, Peter, Krueger, Roger W., Lowe, Brenda A.

[0801] WO 9704103. Mutated 5-enol pyruvylshikimate-3-phosphate synthase, gene coding for said protein and transformed plants containing said gene. Inventor(s): Lubrun, Michel, Sailland, Alain, Freyssinet, Georges.

[0802] WO 9741228. Use of the green fluorescent protein as a screenable marker for plant transformation. Inventor(s): Gordon-Kamm, William, Pierce, Dortothy A, Bidney, Dennis, Millerm Mike, Ross, Margit, Wang, Lijuan, Bowen, Benjamin, Sandahl, Gary, Scelonge, Christopher.

[0803] WO 9831837. Evolution of whole cells and organisms by recursive sequency recombination. Inventor(s): Delcardayre, Stephen B, Minshull, Jeremy, Ness, Jon E, Patten, Phillip, Tobin, Mathew, B, Stemmer, Willem P C.

[0804] WO 9842728. Recombination of polynucleotide sequences using random or defined primers. Inventor(s): Shao, Zhixin, Zhao, Huimin, Aftholter, Joseph A, Arnold, Frances H, Giver, Lorraine J.

[0805] WO 9842851: Plants with modified growth. Inventor(s): Murray, James Augustus Henry.

[0806] WO 9846775. Oxidative stress resistance gene. Inventor(s): Kiraly, Zoltan, Sass, Laszlo, Balazs, Bame, Deak, Maria, Dudits, Denes, Toeroek, Karolyne.

[0807] WO 9958659. Methods and compositions for expression of transgenes in plants. Inventor(s): Kriz, Alan L, Voyles, Dale A, Luethy, Michael H.

[0808] WO 9960129. Methods and compositions for transgene identification. Inventor(s): Spencer, T Michael, Kriz, Alan L.

[0809] WO 9965927. Method for producing polynucleotides with desired properties. Inventor(s): Krebber, Claus M.

[0810] WO 0017364. Cyclin polynucleotides, polypeptides and uses thereof. Inventor(s): Gordon-Kamm, W J, Gregory, Carolyn A, Hoerster, George J, Tao, Yumin, Lowe, Keith S, McElver, John A.

[0811] WO 0000597: Nonsymbiotic plant hemoglobins to maintain cell energy status. Inventor(s): Phillip, G, Duff S M G, Xianzhou, N, Hill, R, Dumin, D, Sowa, A.

[0812] WO 0070062. Expression of sedoheptulose 1,7-bisphosphatase in transgenic plants. Inventor(s): Staub, R L, Miller P W.

[0813] WO 0109302. A novel Agrobacterium-mediated plant transformation method. Inventor(s): Armstrong, Charles L, Rout, Jyoti R.

[0814] WO 0126459. Flowering Time Modification. Inventor(s): Ratcliff, O, Heard, J, Samaha, R, Creelman, R, Keddie, J, Jiang, C, Reuber, L, Riechmann, J L.

[0815] WO 0215675. Genes for Modifying Plant Traits IV. Inventor(s):Pilgrim, M, Creelman, R, Dubell, A J, Heard, J, Jiang, C, Keddie, J, Adam, L, Ratcliff, O, Reuber, J L, Riechmann, J L, Yu, G L, Pineda, O.

[0816] Aarts, M G, Keijzer, C J, Stiekema, W J, Pereira, A. Molecular characterization of the CER1 gene of arabidopsis involved in epicuticular wax biosynthesis and pollen fertility. Plant Cell. December 1995; 7 (12):2115-27.

[0817] Abarca, D, Madueno, F. Martinez-Zapater, J M, Salinas, J. 1999 Dimerization of Arabidopsis 14-3-3 proteins: structural requirements within the N-terminal domain and effect of calcium. FEBS Lett. 462:377-82.

[0818] Ach, R., Durfee, T, Miller, A, Taranto, P, Hanley, L, Zambryski, P and Gruissem, W 1997. RRB1 and RRB2 encode maize retinoblastoma-related proteins that interact with a plant D-type cyclin and geminivirus replication protein. Molecular and Cellular Biology; 17(9):5077-5086.

[0819] Albanis, D, Mariconti, L, Ricagno, S, Pitto, L, Moroni, C, Kristin, H and Cella, R 2000 DcE2F a functional plant E2F-like transcriptional activator from Daucus carota. The Journal of Biological Chemistry;275(25): 19258-19267.

[0820] Albert, H, Dale, E C, Lee, E, Ow, D W. Site-specific integration of DNA into wild-type and mutant lox sites placed in the plant genome. Plant Journal 1995;7(4):649-659.

[0821] Albert, S, Delseny, M, Devic, M 1997 BANYULS, a novel negative regulator of flavonoid biosynthesis in the Arabidopsis seed coat. Plant J;11(2):289-299.

[0822] Albury, M S, Dudley, P, Watts, F Z, Moore, A L. 1996. Targeting the plant alternative oxidase protein to Schizosaccharomyces pombe mitochondria confers cyanide-insensitive respiration. J. Biol. Chem;271(29): 17062-17066.

[0823] Albury, M S, Affourtit, C, Moore, A L. 1998. A highly conserved glutamante residue (Glu-270) is essential for plant alternative oxidase activity. J.Biol Chem;273:301-305.

[0824] Alia, Hayashi H, Mustardy, L, Deshnium, P, Ida, M, Murata, N. Transformation of Arabidopsis thaliana with the coda gene for choline oxidase; accumulation of glycine betaine and enhanced tolerance to salt and cold stress. Plant J July 1977;12(1):133-142.

[0825] Alia, Hayashi H, Sakamoto, A, and Murata, N. Enhancement of the tolerance of Arabidopsis to high temperatures by genetic engineering of the synthesis of glycine betaine. Plant J October 1998; 16(2):155-161.

[0826] Allen, R. Dissection of Oxidative Stress Tolerance Using Transgenic Plants. Plant Physiology 1995; 107:1049-1054.

[0827] Allende, M L, Amsterdam, A, Becker, T, Kawakami, K, Gaiano, N, Hopkins, N. 1996 Genes Dev December 15;10(24):3141-55.

[0828] Allison, L A. 2000 The role of sigma factors in plastid transcription. Biochimie;82(6-7):537-548.

[0829] Allison, L A, North, M T, Neville, L A. 1995 Differential binding of oocyte-type and somatic-type 5S rRNA to TFIIIA and ribosomal protein L5 in Xenopus oocytes: specialization for storage versus mobilization. Dev Biol;168:284-295.

[0830] Allison, L A, Romaniuk, P J, Bakken, A H. 1991 RNA-protein interactions of stored 5S RNA with TFIIIA and ribosomal protein L5 during Xenopus oogenesis. Dev Biol;144:129-144.

[0831] Alonso, J M, Ecker, J R. 2001 The ethylene pathway: a paradigm for plant hormone signaling and interaction. Sci STKE2001: RE1.

[0832] An et al., The Plant Cell, Vol. 1, 115-122, January 1989

[0833] Andersen, P, Kaasen, I, Styrvold, O, Boulnois, G, Strom, A. 1988 Molecular cloning, physical mapping and expression of the bet gene governing the osmoregulatory choline-glycine betaine pathway of Escerichia coli. Journal of General Microbiology; 134:1737-1746.

[0834] Andersen, J M et. al. 1988 P-700 content and polypeptide profile of chlorophyll-protein complexes of spinach and barley thylakoids. Biochim.Biophys.Acta;591 :113-126.

[0835] Ang, L H, Chattopadhyay, S, Wei, N, Oyama, T, Okada, K, Batschauer, A, Deng, X W. 1998 Molecular interaction between COP1 and HY5 defines a regulatory switch for light control of Arabidopsis development. Mol Cell;1:213-222.

[0836] Ansaldi, R, Chaboud, A, Dumas, C. 2000 Multiple S gene family members including natural antisense transcripts are differentially expressed during development of maize flowers. J Biol Chem;275:24146-24155.

[0837] Aoki, H, Dekany, K, Adams, S L and Ganoza, M C. 1997 The gene encoding the elongation factor P protein is essential for viability and is required for protein synthesis. J. Biol. Chem;272 :32254-32259.

[0838] Aoshima, H, Yamada, M, Sauer, N, Komor, E, and Schobert, C. 1993 Heterologous expression the proton/hexose cotransporter from Chlorella in Xenopus oocytes and its characterization with respect to sugar specificity, pH and membrane potential. J. Plant Physiol; 141 :293-297.

[0839] Apse, M. Aharon, G., Snedden, W. and Blumwald E. 1999 Salt tolerance conferred by overexpression of a vacuolar Na+/H+ antiport in Arabidopsis. Science;285: 1256-1258.

[0840] Aquila, H, Link, T A. Klingenberg, M. 1987 Solute carriers involved in energy transfer of mitochondria form a homologous protein family. FEBS Lett;212:1-9.

[0841] Aramayo, R, Timberlake, W E. 1990 Sequence and molecular structure of the Aspergillus nidulans yA (laccase I) gene. Nucleic Acids Res;18(11):3415.

[0842] Aravind, L, Makarova, K S, Koonin, E V. 2000 SURVEY AND SUMMARY: holliday junction resolvases and related nucleases: identification of new families, phyletic distribution and evolutionary trajectories. Nucleic Acids Res;28:3417-3432.

[0843] Arazi, T, Baum, G, Snedden, W A, Shelp, B J, Fromm, H. 1995 Molecular and biochemical analysis of calmodulin interactions with the calmodulin-binding domain of plant glutamate decarboxylase. Plant Physiol;108:551-561.

[0844] Arteca, R. 1995. Brassinosteroids. In Plant Hormones Physiology. Biochemistry and Molecular Biology, ed P J Davies, pp206-13. Dordrecht: Kluwer, 2^{nd} ed.

[0845] Artus, N N, Uemura, M, Steponkus, P L, Gilmour, S J, Lin, C, Thomashow, M F. 1996 Constitutive expression of the cold-regulated Arabidopsis thaliana COR15a gene affects both chloroplast and protoplast freezing tolerance. Proc Natl Acad Sci USA.;93: 13404-13409.

[0846] Ashikari, M, Wu, J, Yano, M, Sasaki, T, Yoshimura, A. 1999 Rice gibberellin-insensitive dwarf mutant gene Dwarf 1 encodes the alpha-subunit of GTP-binding protein. Proc Natl Acad Sci USA; 96:10284-10289.

[0847] Athwal, G S, Lombardo, C R, Huber, J L, Masters, S C, Fu, H, Huber, S C. 2000 Modulation of 14-3-3 protein interactions with target polypeptides by physical and metabolic effectors. Plant Cell Physiol;41 :523-533.

[0848] Aurisano, N, Bertani, A, Reggiani, R. 1995 Anaerobic accumulation of 4-aminobutyrate in rice seedlings; causes and significance. Phytochemistry;38:1147-1150.

[0849] Axelsen, K B, Venema, K, Jahn, T, Baunsgaard, L, and Palmgren, M G. 1999 Molecular dissection of the C-terminal regulatory domain of the plant plasma membrane H⁺-ATPase AHA2: Mapping of residues that when altered give rise to an activated enzyme. Biochemistry, June 1;38(22):7227-7234.

[0850] Babakov, A V, Chelysheva, V V, Klychnikov, O I, Zorinyanz, S E, Trofimova, M S, De Boer, A H. 2000 Involvement of 14-3-3 proteins in the osmotic regulation of H+-ATPase in plant plasma membranes. Planta;21 :446-448.

[0851] Babcock, D, Herringron, J, Goodwin, P, BaePank, Y, Hille, B. 1997 Mitochondrial participation in the intracellular Ca2+ network. J. Cell Biol;136:833-834.

[0852] Babiychuk, E, Kushnir, S, Belles-Boix, E, Van Montagu, M, Inze, D. 1995 Arabidopsis thaliana NADPH oxidoreductase homologs confer tolerance of yeasts toward the thiol-oxidizing drug diamide. J Biol Chem;270:26224-26231.

[0853] Bach, T J, Benveniste, P. 1997. Cloning of cDNAs or genes encoding enzymes of sterol biosynthesis from plants and other eukaryotes: Heterologous expression and complementation analysis of mutations for functional characterization. Prog. Lipid Res;36:197-226.

[0854] Bagnall, D J, King, R W, Whitelam, G C, Boylan, M T, Wagner, D, Quail, P H. 1995 Flowering responses to altered expression of phytochrome in mutants and transgenic lines of Arabidopsis thaliana (L.) Heynh. Plant Physiol; 108:1495-1503.

[0855] Baier, M, Dietz, K J. 1999 Protective function of chloroplast 2-cysteine peroxiredoxin in photosynthesis. Evidence from transgenic Arabidopsis. Plant Physiol;119:1407-1414.

[0856] Bajguz, A, Czerpak, R. 1996. Effect of brassinosteroids on growth and proton extrusion in the alga Chlorella vulgaris. J. Plant Growth Regul;15:153-156.

[0857] Balachandran, S, Xiang, Y, Schobert, C, Thompson, G A, and Lucas, W J. 1997 Phloem sap proteins from Cucurbita maxima and Ricinus communis have the capacity to traffic cell to cell through plasmodesmata. Proc. Natl. Acad. Sci. USA;94:14150-14155.

[0858] Balzi, E, Wang, M, Leterme, S, Dyck, L, Goffeau, A. 1994 PDR5, a novel yeast multidrug resistance conferring transporter controlled by the transcription regulator PDR1. J.Biol.Chem;269:2206-2214.

[0859] Barata, R M, Chaparro, A, Chabregas, S M, Gonzalez, R, Labate, C A, Azevedo, R A, Sarath, G, Lea, P J, Silva-Filho, M C. 2000 Targeting of the soybean leghemoglobin to tobacco chloroplasts: effects on aerobic metabolism in transgenic plants. Plant Sci;155(2):193-202.

[0860] Bariola, P A, Howard, C J, Taylor, C B, Verburg, M T, Jaglan, V D, Green, P J. 1994 The Arabidopsis ribonuclease gene RNS1 is tightly controlled in response to phosphate limitation. Plant J;6:673-685.

[0861] Barroso, J B, Corpas, F J, Carreras, A, Sandalio, L M, Valderrama, R, Palma, J M, Lupianez, J A, del Rio, L A. 1999 Localization of nitric-oxide synthase in plant peroxisomes. J Biol Chem;274:36729-36733.

[0862] Bartig, D, Lemkemeier, K, Frank, J, Lottspeich, F, and Klink, F. 1992 The archaebacterial hypusine-containing protein. Structural features suggest common ancestry with eukaryotic translation initiation factor 5A. Eur. J. Biochem;204:751-758.

[0863] Bartling, D, Rehling, P, Weiler, E W. 1993 Functional expression and molecular characterization of AtUBC2-1, a novel ubiquitin-conjugating enzyme (E2) from Arabidopsis thaliana. Plant Mol Biol;23:387-396.

[0864] Bates, P W, Vierstra, R D. 1999 UPL1 and 2, two 405 kDa ubiquitin-protein ligases from Arabidopsis thaliana related to the HECT-domain protein family. Plant J;20:183-195.

[0865] Baudat, F, Nicolas, A. 1997 Clustering of meiotic double-strand breaks on yeast chromosome III. Proc Natl Acad Sci USA;94:5213-5218.

[0866] Baum, G, Chen, Y, Arazi, T, Takatsuji, H, Fromm H. 1993 A plant glutamate decarboxylase containing a calmodulin binding domain. Cloning, sequence, and functional analysis. J Biol Chem;268:19610-19617.

[0867] Baum, G, Lev-Yadun, S, Fridmann, Y, Arazi, T, Katsnelson, H, Zik, M, Fromm, H. 1996 Calmodulin binding to glutamate decarboxylase is required for regulation of glutamate and GABA metabolism and normal development in plants. EMBO J;15:2988-2996.

[0868] Baunsgaard, L, Venema, K, Axelsen, K B, Villalba, J M, Welling, A, Wollenweber, B, and Palmgren, M G. 1996 Modified plant plasma membrane H⁺-ATPase with improved transport coupling efficiency identified by mutant selection in yeast. Plant J;10:451-458.

[0869] Beck et al., Gene, 19 (1982), 327-336

[0870] Becraft, P W, Stinard, P S, McCarty, D R. 1996 CRINKLY4: A TNFR-like receptor kinase involved in maize epidermal differentiation. Science;273:1406-1409.

[0871] Beers, E P, Moreno, T N, Callis, J. 1992 Subcellular localization of ubiquitin and ubiquitinated proteins in Arabidopsis thaliana. J Biol Chem;267:15432-15439.

[0872] Beligni, M V, Lamattina, L. 2000 Nitric oxide stimulates seed germination and de-etiolation, and inhibits hypocotyl elongation, three light-inducible responses in plants. Planta;210:215-221.

[0873] Bell, E, Creelman, R A, Mullet, J E. 1995 A chloroplast lipoxygenase is required for wound-induced jasmonic acid accumulation in Arabidopsis. Proc. Natl. Acad. Sci. USA;92:8675-8679.

[0874] Belles-Boix, E, Babiychuk, E, Montagu, M V, Inze, D, Kushnir, S. 2000a CEF, a sec24 homologue of arabidopsis thaliana, enhances the survival of yeast under oxidative stress conditions. J Exp Bot;51:1761-1762.

[0875] Belles-Boix, E, Babiychuk, E, Van Montagu, M, Inze, D, Kushnir, S. 2000b CEO 1, a new protein from arabidopsis thaliana, protects yeast against oxidative damage. FEBS Lett;482:19-24.

[0876] Benard, L, Carroll, K, Valle, R C P, Masison, D C, Wickner, R B. 1999 The ski7 antiviral protein is an EF 1-alpha homolog that blocks expression of non-Poly(A) mRNA in Saccharomyces cerevisiae. J Virol;73:2893-2900.

[0877] Benfey, P N, Chua, N -H. Regulated genes in transgenic plants. Science 1989;244:174-181.

[0878] Benne, R, Brown-Luedi, M L, Hershey, J W. 1978 Purification and characterization of protein synthesis initiation factors eIF-1, eIF-4C, eIF-4D, and eIF-5 from rabbit reticulocytes. J Biol Chem;253 :3070-3077.

[0879] Bensen, R J, Johal, G S, Crane, V C, Tossberg, J T, Schanable, P S, Meeley, R B, Briggs, S P. Cloning and characterization of the maize An1 gene. Plant Cell January 1995;7(1):75-84.

[0880] Benveniste, P. 1986 Sterol biosynthesis. Annu. Rev. Plant Physiol;37:275-308.

[0881] Berberich, T, Sano, H, Kusano, T. 1999 Involvement of a MAP kinase, ZmMPK5, in senescence and recovery from low-temperature stress in maize. Mol Gen Genet. 262:534-42.

[0882] Berberich, T, Kusano, T. Cycloheximide induces a subset of low temperature-inducible genes in maize. Mol Gen Genet 1997;254:275-283.

[0883] Berberich, T, Sano, H, and Kusano, T. Involvement of a MAP kinase, ZmMPK5, in senescence and recovery from low-temperature stress in maize. Mol. Gen. Genet. 1999;262:534-542.

[0884] Bertin, P. Somaclonal variation and chilling tolerance improvement in rice: changes in fatty acid composition. Plant Growth Regulation January 1998; 24(1):31-41.

[0885] Bertolotti, A, Ron, D. 2001 Alterations in an IRE1-RNA complex in the mammalian unfolded protein response. J Cell Sci. 114(Pt 17):3207-3212.

[0886] Bertram, P G, Zeng, C, Thorson, J, Shaw, A S, Zheng, X F. 1998 The 14-3-3 proteins positively regulate rapamycin-sensitive signaling. Curr Biol; 8:1259-1267.

[0887] Bevan, M, Barnes, W M, Chilton, M D. Structure and transcription of the nopaline synthase gene region of T-DNA. Nucleic Acids Res January 25, 1983; 11(2):369-385.

[0888] Beyer, A. Sequence analysis of the AAA protein family. Protein Sci October 1997; 6(10):2043-2058.

[0889] Biegen, C, Weiler, E W. 1998 Structure and regulation of OPR1 and OPR2: two closely related genes encoding 12-oxophytodienoic acid-10,11-reductases from Arabidopsis thaliana. Planta; 208:155-165.

[0890] Blaszczyk, A, Brodzik, R, Sirko, A. 1999 Increased resistance to oxidative stress in transgenic tobacco plants overexpressing bacterial serine acetyltransferase. Plant J; 20:237-243.

[0891] Bleecker, A B, Esch, J J, Hall, A E, Rodriguez, F I, Binder B M. 1998 The ethylene-receptor family from Arabidopsis: structure and function. Philos Trans R Soc Lond B Biol Sci 353:1405-1412.

[0892] Bloch, K E. 1983. Sterol structure and membrane function. Crit. Rev. Biochem;14:47-91.

[0893] Blumwald, E. and Gelli, A. 1997. A secondary inorganic ion transport in plant vacuoles. Advanced Botany Research. 25:401-407

[0894] Boggon, T J, Shan, W S, Santagata, S, Myers, S C, Shapiro, L. 1999 Implication of tubby proteins as transcription factors by structure-based functional analysis. Science;286:2119-2125.

[0895] Bohlmann, J, Meyer-Gauen, G, Croteau, R. 1998 Plant terpenoid synthases: molecular biology and phylogenetic analysis. Proc Natl Acad Sci USA;95:4126-4133.

[0896] Bolarin, M, Santa-Cruz, A, Cayuela, E, Perez-Alfocea, F 1995 Short-term solute changes in leaves and roots of cultivated and wild tomato seedlings under salinity. J. Plant Physiol;147: 463-468.

[0897] Bolle, C, Koncz, C, Chua, N H. 2000 PAT1, a new member of the GRAS family, is involved in phytochrome A signal transduction. Genes Dev; 14:1269-1278.

[0898] Bolognese, C. and McGraw, P. The isolation and characterization in yeast of a gene for Arabidopsis S-adenosylmethionine: phophoethanolomine N-methyltransferase. Plant Physiology 2000;124:1800-1813.

[0899] Bonello, J -F, Opsahl-Ferstak, H -G, Peres, P, Dumas, C, Rogowsky, P M. 2000 Esr genes show different levels of expression in the same region of maize endosperm. Gene;246:219-227.

[0900] Bonfil, D J, Ronen-Tarazi, M, Sultemeyer, D, Lieman-Hur-witz, J, Schatz, D, and Kaplan, A. 1998 A putative HC03-transporter in the cyanobacterium Synechococcus sp. Strain PCC 7942. FEBS Lett;430:236-240.

[0901] Boorer, K J, Loo, D D F, Frommer, W B, Wright, E M. 1996 Transport mechanism of the cloned potato H⁺/sucrose transporter StSUT1. J. Biol. Chem;271:25139-25144.

[0902] Boorer, K J, Loo, D D F, Wright, E M. 1994 Steady-state and presteady-state kinetics of the H⁺/hexose cotransporter (STP1) from Arabidopsis thaliana expressed in Xenopus oocytes. J. Biol. Chem;269:20417-20424.

[0903] Borevitz, J O, Xia, Y, Blount, J, Dixon, R A, Lamb, C. 2000 Activation tagging identifies a conserved MYB regulator of phenylpropanoid biosynthesis. Plant Cell;12:2383-2393.

[0904] Borghese, B, Crimi, M, Fava, L, Melandri, B A. 1998 The ATP Synthase atpHAGDC (Fi) Operon from Rhodobacter capsulatus. J Bacter; 180: 416-421.

[0905] Borghese, B, Turina, P, Lambertini, L, Melandri, B A. 1998 The atpBEXF operon coding for the Fo sector of the ATP synthase from the purple nonsulfur photosynthetic bacterium Rhodobacter capsulans. Arch Microbiol;170: 385-388.

[0906] Boscheinen, O, Lyck, R, Queitsch, C, Treuter, E, Zimarino, V, Scharf, K D. 1997 Heat stress transcription factors from tomato can functionally replace HSF1 in the yeast Saccharomyces cerevisiae. Mol Gen Genet;255:322-331.

[0907] Bouche-Pillon, S, Fleurat-Lessard, P, Fromont, J -C, Serrano, R, and Bonnemain, J -L. 1994 Immunolocalization of the plasma membrane H⁺-ATPase in minor veins of Vicia faba in relation to phloem loading. Plant Physiol;105:691-697.

[0908] Bourbouloux, A, Shahi, P, Chakladar, A, Delrot, S, Bachhawat, A K. 2000 Hgt1p, a high affinity glutathione transporter from the yeast Saccharomyces cerevisiae. J Biol Chem. May 5; 275(18):13259-13265.

[0909] Bowler, C, Slooten, L, Vandenbranden, S, De Rycke, R, Botterman, J, Sybesma, C, Van Montagu, M, Inze, D. 1991 Manganese superoxide dismutase can reduce cellular damage mediated by oxygen radicals in transgenic plants. EMBO J;10:1723-1732.

[0910] Bowyer, J R, Leegood, R C. 1997 Photosynthesis. In: Plant Biochemistry, Dey P M and Harborn J B eds, pg 49-110. Academic Press.

[0911] Boyer, P D. 1997 The ATP synthase—a splendid molecular machine. Annu Rev Biochem;66:717-749.

[0912] Bray, M, Driscoll, J, Huggins, J W. Treatment of lethal Ebola virus infection in mice with a single dose of an S-adenosyl-L-homocysteine hydrolase inhibitor. Antiviral Res. February 2000; 45(2):135-147.

[0913] Breitkruz, K E, Shelp, B J. 1995 Subcellular compartmentation of the 4-aminobutyrate shunt in protoplasts of developing soybean cotyledons. Plant Physiol;108:99-103.

[0914] Bressan, D A, Baxter, B K, Petrini, J H. 1999 The Mre11-Rad50-Xrs2 protein complex facilitates homologous recombination-based double-strand break repair in Saccharomyces cerevisiae. Mol Cell Biol;19:7681-7687.

[0915] Brewster, J L, de Valoir, T, Dwyer, N D, Winter, E, Gustin, M C. An Osmosensing Signal Transduction Pathway in Yeast. Science 1993;259:1760-1763.

[0916] Briat, J -F, Lobreaux, S, Grignon, N, Vansuyt, G. Review: Regulation of plant ferritin synthesis: how and why. Cellular and Molecular Life Sciences; 56 1999:155-166.

[0917] Brown, G G, Lee, J S, Brisson, N, Verma, D P. The evolution of a plant globin gene family. J Mol Evol 1984;21:19-32.

[0918] Brown, J T, Bai, X, Johnson, A W. 2000 The yeast antiviral proteins Ski2p, Ski3p, and Ski8p exist as a complex in vivo. RNA;6:449-457.

[0919] Bruce, W B, Quail, P H. 1990 Cis-acting elements involved in photoregulation of an oat phytochrome promoter in rice. Plant Cell;2:1081-1089.

[0920] Brzobohaty, B, Moore, I, Kristoffersen, P, Bako, L, Campos, N, Schell, J, Palme, K. 1993 Release of active cytokinin by a beta-glucosidase localized to the maize root meristem. Science;262:1051-1054.

[0921] Buchanan, B et al. Biochemistry and Molecular Biology of Plants. American Society of Plant Physiologists 2000:1189-1197.

[0922] Bugos, R C, Hieber, A D, Yamamoto, H Y. 1998 Xanthophyll cycle enzymes are members of the lipocalin family, the first identified from plants. J Biol Chem;273:15321-15324.

[0923] Bulow, L, Holmberg, N, Lilius, G, Bailey, J E. The metabolic effects of native and transgenic hemoglobins on plants. Trends Biotechnol. January 1999;17(1):21-24.

[0924] Bürkle, L, Hibberd, J M, Quick, W P, Kühn, C, Himer, B, and Frommer, W B. 1998 The H⁺-sucrose co-transporter NtSUT1 is essential for sugar export from tobacco leaves. Plant Physiol;118:59-68.

[0925] Burleigh, S H, Harrison, M J. 1999 The Down-Regulation of Mt4-Like Genes by Phosphate Fertilization Occurs Systemically and Involves Phosphate Translocation to the Shoots. Plant Physiol;119:241-248.

[0926] Buschges, R, Hollricher, K, Panstruga, R, Simons, G, Wolter, M, Frijters, A, van Daelen, R, van der Lee, T, Diergaarde, P, Groenendijk, J, Topsch, S, Vos, P, Salamini, F, Schulze-Lefert, P. 1997 The barley Mlo gene: a novel control element of plant pathogen resistance. Cell 1997;88:695-705.

[0927] Bush, D S. 1995 Calcium regulation in plant cells and its role in signaling. Annu Rev Plant Physiol Plant Mol Bio;46:95-122.

[0928] Byrne, M E, Barley, R, Curtis, M, Arroyo, J M, Dunham, M, Hudson, A, Martienssen, R A. 2000 Asymmetric leaves1 mediates leaf patterning and stem cell function in Arabidopsis. Nature;408:967-971.

[0929] Byrne, P F, McMullen, M D, Snook, M E, Musket, T A, Theuri, J M, Widstrom, N W. 1996 Quantitative trait loci and metabolic pathways: Genetic control of the concentration of maysin, a corn earworm resistance factor, in maize silks. Proc. Nat. Acad. Sci. USA;93:8820-8825.

[0930] Cabrillac, D, Cock, J M, Dumas, C, Gaude, T. 2001 The S-locus receptor kinase is inhibited by thioredoxins and activated by pollen coat proteins. Nature;410:220-223.

[0931] Cadet, F, Meunier, J C. pH and kinetic studies of chloroplast sedoheptulose-1,7-bisphosphatase from spinach (Spinacia oleracea). Biochem J Jul. 1, 1988;253(1):249-254.

[0932] Cadet, F, Meunier, J C. Spinach (Spinacia oleracea) chloroplast sedoheptulose-1,7-bisphosphatase. Activation and deactivation, and immunological relationship to fructose-1,6-bisphosphatase. Biochem J Jul. 1, 1988; 253(1):243-248.

[0933] Cadet, F, Meunier, J C, Ferte, N. Isolation and purification of chloroplastic spinach (Spinacia oleracea) sedoheptulose-1,7-bisphosphatase. Biochem J 1987;241:71-74.

[0934] Calderon-Urrea, A, Dellaporta, S L. 1999 Cell death and cell protection genes determine the fate of pistils in maize. Development; 126:435-441.

[0935] Caliebe, A, Grimm, R, Kaiser, G, Lubeck, J, Soll, J, Heins, L. 1997 The chloroplastic protein import machinery contains a Rieske-type iron-sulfur cluster and a mononuclear iron-binding protein. EMBO J;16:7342-7350.

[0936] Campbell, C E, Kircher, H W. 1980. Senita cactus: A plant with interrupted sterol biosynthetic pathways. Phytochemistry;19:2777-2779.

[0937] Canovas, D, Vargas, C, Kneip, S, Moron, M, Ventosa, A, Bremer, E, Nieto, J. Genes for the synthesis of the osmoprotectant glycine betaine from choline in the moderately halophobic bacterium Halomonas elongata DSM3043. Microbiolgy 2000;146:455-463.

[0938] Cao et al. 2001. Molecular cloning and characterization of a cDNA encoding soybean nodule IMPD dehydrogenase. BBA;1520:242-246.

[0939] Cao, H, Chen, S. 1995 Brassinosteroid-induced rice lamina joint inclination and its relation to indole-3-acetic acid and ethylene. Plant Growth Regul;16:189-196.

[0940] Carabelli, M, Sessa, G, Baima, S, Morelli, G, Ruberti, I. 1993 The Arabidopsis Athb-2 and -4 genes are strongly induced by far-red-rich light. Plant J;4:469-479.

[0941] Carels, N, Hatey, P, Jabbari, K, Bernardi, G. Compositional properties of homologous coding sequences from plants. J Mol Evol. January 1998;46(1);45-53.

[0942] Carlson, R E. 1990 Heat stress, plant-available soil moisture, and corn yields in Iowa: A short- and long-term view. J. Prod. Agric;3:293-297.

[0943] Carter, C, Thornburg, R W. 2000 Tobacco nectarin I. Purification and characterization as a germin-like, manganese superoxide dismutaste implicated in defense of floral reproductive tissues. J Biol Chem;275:36726-36733.

[0944] Cary, A J, Liu, W, Howell, S H. 1995 Cytokinin action is coupled to ethylene in its effects on the inhibition of root and hypocotyl elongation in Arabidopsis thaliana seedlings. Plant Physiol;107:1075-1082.

[0945] Casagrande, R, Stern, P, Diehn, M, Shamu, C, Osario, M, Zuniga, M, Brown, P O, Ploegh, H. 2000 Degradation of proteins from the ER of S. cerevisiae requires an intact unfolded protein response pathway. Mol Cell;5(4):729-735.

[0946] Casal, J J. 1996 Phytochrome A enhances the promotion of hypocotyl growth caused by reductions in levels of phytochrome B in its far-red-light-absorbing form in light-grown Arabidopsis thaliana. Plant Physiol;112:965-973.

[0947] Castleberry, R. M. 1979 Latente, a new type of drought tolerance?. Proc Annu Corn Sorghum Res Conf;34:46-56.

[0948] Chambraud, B, Radanyi, C, Camonis, J H, Shazand, K, Rajkowski, K, Baulieu, EE. 1996 FAP48, a new protein that forms specific complexes with both immunophilins FKBP59 and FKBP12. Prevention by the immunosuppressant drugs FK506 and rapamycin. J Biol Chem;271 :32923-32929.

[0949] Chan, S N, Harris, L, Bolt, E L, Whitby, M C, Lloyd, R G. 1997 Sequence specificity and biochemical characterization of the RusA Holliday junction resolvase of Escherichia coli. J Biol Chem 272:14873-14882.

[0950] Chapman, D. 1998 Phospholipase activity during plant growth and development and in response to environmental stress. Trends Plant Sci;3:419-426.

[0951] Chattopadhyay, S, Ang, L H, Puente, P, Deng, X W, Wei, N. 1998 Arabidopsis bZIP protein HY5 directly interacts with light-responsive promoters in mediating light control of gene expression. Plant Cell;10:673-683.

[0952] Cheikh, N and Jones, R J. 1994 Disruption of maize kernel growth and development by heat stress. Plant Physiol;106:45-51.

[0953] Chekanova, J A, Shaw, R J, Wills, M A, Belostotsky, D A. 2000 Poly(A) tail-dependent exonuclease AtRrp41p from arabidopsis thaliana rescues 5.8 S rRNA processing and mRNA decay defects of the yeast ski6 mutant and is found in an exosome-sized complex in plant and yeast cells. J Biol Chem;275:33158-33166.

[0954] Chen, Y F, Matsubayashi, Y, Sakagami, Y. 2000 Peptide growth factor phytosulfokine-alpha contributes to the pollen population effect. Planta;211:752-755.

[0955] Chen, F, Foolad, M R. 1997 Molecular organization of a gene in barley which encodes a protein similar to aspartic protease and its specific expression in nucellar cells during degeneration. Plant Mol Biol;35:821-831.

[0956] Chen, Q, Hung, F C, Fromm, L, Overbeek, P A. 2000 Induction of cell cycle entry and cell death in postmitotic lens fiber cells by over expression of E2F1 or E2F2. Invest Ophthalmol Vis Sci;41 :4223-4231.

[0957] Chen, X, Wu, R. Direct amplicification of unknown genes and fragments by Uneven polymerase chain reaction. Gene Feb. 7, 1997; 185(2):195-199.

[0958] Chen, Z P, Chen, K Y. 1997a Dramatic attenuation of hypusine formation on eukaryotic initiation factor 5A during senescence of IMR-90 human diploidfibroblasts. J Cell Physiol;170:248-254.

[0959] Chen, Z P, Chen, K Y. 1997b Marked elevation of hypusine formation activity on eukaryotic initiation factor 5A in v-HA-RAS transformed mouse NIH3T3 cells. Cancer Lett;115:235-241.

[0960] Chiadmi, M, Navaza, A, Miginiac-Maslow, M, Jacquot, J P, Cherfils, J. Redox signalling in the chloroplast: structure of oxidized pea fructose-1,6-bisphosphate phosphatase. EMBO J Dec. 1, 1999; 18(23):6809-6815.

[0961] Chiang, P K, Gordon, R K, Tal, J, Zeng, G C, Doctor, B P, Pardhasaradhi, K, McCann, P P. S-Adenosylmethionine and methylation. FASEB J 1996; 10:471-480.

[0962] Childs, K L, Pratt, L H, Morgan, P W. 1991 Genetic regulation of development in Sorghum bicolor. VI. The ma3 allele results in abnormal phytochrome physiology. Plant Physiol;108:345-351.

[0963] Chivasa, S, Berry, J O, Rees, T, Carr, J P. 1999 Changes in gene expression during development and thermogenesis in Arum. Aust. J. of Plant Physiol;26:391-399.

[0964] Cho, M. H., Shears, S. B., Boss, W. F. 1993 Changes in phosphatidylinositol metabolism in response to hyperosmotic stress in Daucus carota L. cells grown in suspension culture. Plant Physiol.103, 637-647.

[0965] Choe, S, Dilkes, B. Gregory, B D, Ross, A S, Yuan, H, Noguchi, T, Fujioka, S, Takatsuto, S, Tanaka, A, Yoshida, S. 1999a. Arabidopsis dwarfl is defective in the conversion of 24-methylenecholesterol to campesterol in brassinosteroid biosynthesis. Plant Physiol;119:897-907.

[0966] Choe, S, Noguchi T, Fujioka, S, Takatsuto S, Tissier C P, Gregory B D, Ross A S, Tanaka A, Yoshida S, Tax F E 1999b. The Arabidopsis dwf7/ste1 mutant is defective in the ⁷sterol C-5 desaturation step leading to brassinosteroid biosynthesis. Plant Cell; 11:207-221.

[0967] Choi, G, Yi, H, Lee, J, Kwon, Y K, Soh, M S, Shin, B, Luka, Z, Hahn, T R, Song, P S. 1999 Phytochrome signalling is mediated through nucleoside diphosphate kinase 2. Nature;401 :610-613.

[0968] Cholewa, E, Cholewinski, A J, Shelp, B J, Snedden, W A, Bown, A W. 1997 Cold stimulated—aminobutyric acid synthesis is mediated by an increase in cytosolic Ca²⁺, not by an increase in cytosolic H⁺. Can J Bot;75:375-382.

[0969] Chow, W S, Melis, A, Anderson, J M. Adjustments of photosystem stoichiometry in chloroplasts improve the quantum efficiency of photosynthesis. Proc. Natl.Acad.Sci. USA Oct. 1, 1990; 87(19):7502-7506.

[0970] Chrispeels, M J, Crawford, N M, Schroeder, J I. 1999. Proteins for Transport of Water and Mineral Nutrients across the Membranes of Plant Cells. Plant Cell;11:661-676.

[0971] Chu, C C., C C. Wang, C S. Sun, C. Hus, K C. Yin, C Y. Chu and F Y. Bi. 1975 Establishment of an efficient medium for anther culture of rice through comparative experiments on the nitrogen sources. Sci. Sin.18: 659-668.

[0972] Chung, W S, Lee, S H, Kim, D H, Kim, M C, Park, C Y, Park, H C., Lim, C O, Harper, J F, Cho, M J. 2000 Identification of a calmodulin-regulated soybean Ca+-ATPase (SCA1) that is located in the plasma membrane. Plant Cell;12:1393-1407.

[0973] Chung, Y Y, Kim, S R, Finkel, D, Yanofsky, M F, An, G. 1994 Early flowering and reduced apical dominance result from ectopic expression of a rice MADS box gene. Plant Mol Biol.26:657-65.

[0974] Cicek, M, Blanchard, D J, Bevan, D R, Esen, A. The aglycone specificity determining sites are different in DIMBOA-glucosidase (maize □-glucosidase) and dhurrinase (sorghum □-Glucosidase). J Biol Chem Jun. 30, 2000;275(26):20002-20011.

[0975] Clark, J K and Sheridan, W F. 1991 Isolation and characterization of 51 embryo-specific mutations of maize. Plant Cell;3:935-951.

[0976] Clark, M S. 1977 Plant Molecular Biology: A Laboratory Manual, Springer-Verlag.

[0977] Clarke, A, Desikan, R, Hurs,t R D, Hancock, J T, Neill, S J. 2000 NO way back: nitric oxide and programmed cell death in Arabidopsis thaliana suspension cultures. Plant J;24:667-677.

[0978] Close, T J, Kortt, A A, Chandler P M. 1989 A cDNA-based comparison of dehydration-induced proteins (dehydrins) in barley and corn. Plant Mol Biol;13:95-108.

[0979] Close, T J, Lammers, P J. 1993 An osmotic stress protein of cyanobacteria is immunologically related to plant dehydrins. Plant Physiol. March 1993;101(3):773-779.

[0980] Clough, R C, Casal, J J, Jordan, E T, Christou, P, Vierstra, R D. 1995 Expression of functional oat phytochrome A in transgenic rice. Plant Physiol;109:1039-1045.

[0981] Clouse, S D, Sasse, J M. 1998. Brassinosteroids: Essential regulators of plant growth and development. Annu. Rev. Plant Physiol. Plant Mol. Biol;49: 427-451.

[0982] Clouse, S D., Hall, A F, Langford, M, McMorris, T C, Baker, M E J. 1993. Physiological and molecular effects of brassinosterioids on Arabidopsis thaliana. J. Plant Growth Regul; 12:61-66.

[0983] Cockcroft, C E, den Boer, B G, Healy, J M, Murray, J A. 2000 Cyclin D control of growth rate in plants. Nature. 405:575-579.

[0984] Coe, Jr, E H, Neuffer, M G, Hoisington, D A. 1988) The genetics of corn. In “Corn and Corn Improvement 3^{rd.} ed.” (eds. Sprague G F and Dudley J W), p.81-258. American Society of Agronomy, Madison, Wis.

[0985] Coleman, S T, Fang, T K, Rovinsky, S A, Turano, F J, Moye-Rowley, W S. Expression of a glutamate decarboxylase homologue is required for normal oxidative stress tolerance in Saccharomyces cerevisiae. J Biol Chem Jan. 5, 2001;276(1):244-250.

[0986] Collart et al. 1996. Cloning and Characterization of the gene encoding IMP dehydrogenase from Arabidopsis thaliana. Gene. 174:217-220.

[0987] Colon-Carmona, A, Chen, D L, Yeh, K C, Abel, S. 2000 Aux/IAA proteins are phosphorylated by phytochrome in vitro. Plant Physiol.124:1728-38.

[0988] Condorelli, G, Roncarati, R, Ross, J Jr, Pisani, A, Stassi, G, Todaro, M, Trocha, S, Drusco, A, Gu, Y, Russo, M A, Frati, G, Jones, S P, Lefer, D J, Napoli, C, Croce, C M. 2001 Heart-targeted overexpression of caspase3 in mice increases infarct size and depresses cardiac function. Proc Natl Acad Sci USA;98:9977-9982.

[0989] Connell, P, Ballinger, C A, Jiang, J, Wu, Y, Thompson, L J, Hohfeld, J, Patterson, C. 2001 The co-chaperone CHIP regulates protein triage decisions mediated by heat-shock proteins. Nat Cell Biol;3 :93-96.

[0990] Cooper, G. 1995 Oncogenes, second edition. Jones and Bartlett publishers. Sudbury, Mass.

[0991] Cooper, H L, Park, M H, Folk, J E, Safer, B, Braverman, R. 1983 Identification of the hypusine-containing protein hy+ as translation initiation factor eIF-4D. Proc Natl Acad Sci USA; 80:1854-1857.

[0992] Cooper, P, Selman, I. 1974 An analysis of the effects of tobacco mosaic virus on growth and the changes in the free amino compounds in young tomato plants. Ann Bot;38:625-638.

[0993] Coruzzi, G M, Zhou, L. 2001 Carbon and nitrogen sensing and signaling in plants: emerging ‘matrix effects’. Curr Opin Plant Biol. June;4(3):247-253.

[0994] Cosgrove, D J. 1997 Relaxation in a high-stress environment: the molecular basis of extensible cell walls and cell enlargement. Plant Cell;9:1031-1041.

[0995] Cotelle, V, Meek, S E, Provan, F, Milne, F C, Morrice, N, MacKintosh, C. 2000 14-3-3s regulate global cleavage of their diverse binding partners in sugar-starved Arabidopsis cells. EMBO J;19:2869-2876.

[0996] Covic, L, Silva, N F, Lew, R R. Functional characterization of ARAKIN (ATMEKK1): a possible mediator in an osmotic stress pathway in higher plants. BBCA;1451, 1999:242-254.

[0997] Craig, K L, Tyers, M. 1999 The F-box: a new motif for ubiquitin dependent proteolysis in cell cycle regulation and signal transduction. Prog Biophys Mol Biol;72:299-328.

[0998] Crawford, L, Brown, A, Breitkreuz, K, Guinel, F. 1994 The synthesis of y-aminobutric acid in response to treatments reducing cytosolic pH. Plant Physiol;104: 865-871.

[0999] Crawford, N A, Droux, M, Kosower, N S, Buchanan, B B. 1989 Evidence for function of the ferredoxin/thioredoxin system in the reductive activation of target enzymes of isolated intact chloroplasts. Arch. Biochem. Biophys;271:223-239.

[1000] Creelman, R A, and Mullet, J E. 1997 Biosynthesis and action of jasmonates in plants. Annu. Rev. Plant Physiol. Plant Mol. Biol;48:355-381.

[1001] Creelman, R A., and Mullet, J E. 1995 Jasmonic acid distribution and action in plants: Regulation during development and response to biotic and abiotic stress. Proc. Natl. Acad. Sci. USA;92:4114-4119.

[1002] Crowley, J H, Tove, S, and Parks, L W. 1998. A calcium-dependent ergosterol mutant of Saccharomyces cerevisiae. Curr. Genet;34:93-99.

[1003] Cruz, R T, Jordan, W R, and Drew, M C. 1992. Structural changes and associated reduction of hydraulic conductance in roots of Sorghum bicolor L. following exposure to water deficit. Plant Phys;99:203-212.

[1004] Cruz-Hernandez, A, Gomez-Lim, M A. 1995. Alternative oxidase from mango (Mangifera indica L.) is differentially regulated during fruit ripening. Planta;197:569-576.

[1005] Curie, C, Panaviene, Z, Loulergue, C, Dellaporta, S L, Briat, J F, Walker, E L. 2001 Maize yellow stripel encodes a membrane protein directly involved in Fe(III) uptake. Nature;409:346-349.

[1006] Cutler, H, Yokota, T, Adam, G eds. 1991. Brassinosteroids Chemistry, Bioactivity, and Applications. Washington, DC: Am. Chem. Soc.

[1007] D'Halluin, K, Bonne, E, Bossut, M, Beuckeleer, M de, Leemans, J. Transgenic maize plants by tissue electroporation. The Plant Cell December 1992;4(12):1495-1505.

[1008] Dahlgren, A, Ryden-Aulin, M. 2000 A novel mutation in ribosomal protein S4 that affects the function of a mutated RF1. Biochimie;82:683-691.

[1009] Daniel, X, Lacomme, C, Morel, J B, Roby, D. 1999 A novel myb oncogene homologue in Arabidopsis thaliana related to hypersensitive cell death. Plant J;20:57-66.

[1010] Daram, P, Brunner, S, Rausch, C, Steiner, C, Amrhein, N, Bucher, M. 1999. Pht2; 1 Encodes a Low-Affinity PhosphateTransporter from Arabidopsis. Plant Cell;11:2153-2166.

[1011] Daruwala, R, Song, J, Koh, W S, Rumsey, S C, Levine, M. 1999 Cloning and functional characterization of the human sodium-dependent vitamin C transporters hSVCT1 and hSVCT2. FEBS Lett; 460:480-484.

[1012] Daub, M E 1999 Cercosporin, a photosensitizing toxin from Cercospora species. Phytopathology;72:370-374.

[1013] Davis, S J, Kurepa, J, Vierstra, R D. 1999 The Arabidopsis thaliana HY1 locus, required for phytochrome-chromophore biosynthesis, encodes a protein related to heme oxygenases. Proc Natl Acad Sci USA;96:6541-6546.

[1014] Day, D A, Dry, I B, Soole, K L, Wiskich, J T, Moore, A L. 1991 Regulation of alternative pathway activity in plant mitochondria: deviations from Q-pool behavior during oxidation of NADH and quinols. Plant Physiol;95:948-953.

[1015] Day, D A, Whelan, J, Millar, A H, Siedow, J N, Wiskich, J T. 1995 Regulation of alternative oxidase in plants and fungi. Aust. J. Plant Physiol;22:497-509.

[1016] Day, D A, Wiskich, J T. 1995 Regulation of alternative oxidase activity in higher plants. J. Bioenerg. Biomembr;27:379-385.

[1017] De Block, M, Botterman, J, Vandiwiele, M, Dockx, J, Thoen, C, Gossele, V, Movva, N R, Thompson, C, Van Montagu, M, Leemans, J. EMBO J 1987; 6:2513-2518; see also PCT Publication number WO 87/05629, published Sep. 24, 1987.

[1018] De Block, M., De Brouwer, D., Tenning, P. 1989. Transformation of Brassica napus and Brassica oleracea using Agrobacterium tumefaciens and the expression of the bar and neo genes in the transgenic tissue. Plant Physiology, 91: 694-701.

[1019] de Vetten N, Quattrocchio F, Mol J, Koes R. 1997 The an11 locus controlling flower pigmentation in petunia encodes a novel WD-repeat protein conserved in yeast, plants, and animals. Genes Dev;11:1422-1434.

[1020] de Vetten N C, Lu G, Feri R J. 1992 A maize protein associated with the G-box binding complex has homology to brain regulatory proteins. Plant Cell;4:1295-1307.

[1021] De Vlaming, P, Comu, A, Farcy, E, Gerats, A G M, Maizonnier, D, Wiering, H, Wijsman, H J W. 1984 Petunia hybrida 2. A short description of the action of 91 genes, their origin and their map location. Plant Mol. Rep;2:21-42.

[1022] Deak, M, Horvath, G V, Davletova, S, Torok, K, Sass, L, Vass, I, Barna, B, Kiraly, Z, Dudits, D. 1999 Plants ectopically expressing the iron-binding protein, ferritin, are tolerant to oxidative damage and pathogens. Nat Biotechnol; 17:192-196.

[1023] Dechend, R, Hirano, F, Lehmann, K, Heissmeyer, V, Ansieau, S, Wulczyn, F G, Scheidereit, C, Leutz, A. 1999 The Bcl-3 oncoprotein acts as a bridging factor between NF-kappaB/Rel and nuclear co-regulators. Oncogene;18:3316-3323.

[1024] Dehesh, K, Franci, C, Parks, B M, Seeley, K A, Short, T W, Tepperman J M, Quail P H. 1993 Arabidopsis HY8 locus encodes phytochrome A. Plant Cell;5:1081-1088.

[1025] Dehesh, K, Hung, H, Tepperman, J M, Quail, P H. 1992 GT-2: a transcription factor with twin autonomous DNA-binding domains of closely related but different target sequence specificity. EMBO J;11:4131-4144.

[1026] Dekeyser, R, Claes, B, Marichal, M, Van Montagu, M, Caplan, A. Evaluation of selectable markers for rice transformation. Plant Physiol 1989;90:217-223.

[1027] del Pozo, J C, Estelle, M. 2000 F-box proteins and protein degradation: an emerging theme in cellular regulation. Plant Mol Biol;44:123-128.

[1028] del Pozo, J C, Allona, I, Rubio, V, Leyva, A, de la Pena, A, Aragoncillo, C, Paz-Ares, J. A type 5 acid phosphatase gene from Arabidopsis thaliana is induced by phosphate starvation and by some other types of phosphate mobilising/oxidative stress conditions. Plant J September 1999; 19(5):579-589.

[1029] Della-Cioppa, G, Bauer, S C, Taylor, M T, Rochester, D E, Klein, B K, Shah, D M, Fraley R T, Kishore, G M. Targeting a herbicide-resistant enzyme from Escherichia coli to chloroplasts of higher plants. Bio/Technology 1987;5:579-584.

[1030] Dellaporta et al. In: Chromosome Structure and Function: Impact of new Concepts, 18^{th} Stadler Genetics Symposium, 11:263-282, 1988.

[1031] DeLong A, Calderon-Urrea A, Dellaporta S L. 1993 Sex determination gene TASSELSEED2 of maize encodes a short-chain alcohol dehydrogenase required for stage-specific floral organ abortion. Cell;74:757-768.

[1032] Delrot, S. 1989. Phloem loading. In Transport of Photoassimilates, D A Baker and J A Milburn, eds (London: Longman Scientific), pp. 167-205.

[1033] Deltour, R, Fransolet, S, Loppes, R. 1981 Inorganic phosphate accumulation and phosphatase activity in the nucleus of maize embryo root cells. J Cell Sci;47:77-89.

[1034] Deveraux, Q L, Reed, J C. 1999 IAP family proteins—suppressors of apoptosis. Genes Dev;13:239-252.

[1035] Devic, M, Guilleminot, J, Debeaujon, I, Bechtold, N, Bensaude, E, Koornneef, M, Pelletier, G, Delseny, M. 1999 The BANYULS gene encodes a DFR-like protein and is a marker of early seed coat development. Plant J;9(4):387-398.

[1036] Devlin, P F, Patel, S R, Whitelam, G C. 1998 Phytochrome E influences internode elongation and flowering time in Arabidopsis. Plant Cell;10:1479-1487.

[1037] Devlin, P F, Robson, P R, Patel, S R, Goosey, L, Sharrock, R A, Whitelam, G C. (1999) Phytochrome D acts in the shade-avoidance syndrome in Arabidopsis by controlling elongation growth and flowering time. Plant Physiol;119:909-915.

[1038] Devoto, A, Piffanelli, P, Nilsson, I, Wallin, E, Panstruga, R, von Heijne, G, Schulze-Lefert, P. 1999 Topology, subcellular localization, and sequence diversity of the Mlo family in plants. J Biol Chem. 1999;274:34993-35004.

[1039] DeWitt, N D, Harper, J F, and Sussman, M R. 1991 Evidence for a plasma membrane proton pump in phloem cells of higher plants. Plant J;1:121-128.

[1040] DeWitt, N D, Sussman, M R. 1995 Immunocytological localization of an epitope-tagged plasma membrane proton pump (H⁺-ATPase) in phloem companion cells. Plant Cell;7:2053-2067.

[1041] Dhaese, P, DeGreve, H, Gielen, J, Seurinch, J, Van Montagu, M, Schell, J. Identification of sequences involved in the polyadenylation of higher plant nuclear transcripts using Agrobacterium T-DNA genes as models. EMBO Journal 1983;2(3):419-426.

[1042] Dhondt, S, Geoffroy, P, Stelmach, B A, Legrand, M, Heitz, T. 2000 Soluble phospholipase A2 activity is induced before oxylipin accumulation in tobacco mosaic virus-infected tobacco leaves and is contributed by patatin-like enzymes. Plant J. August 2000;23(4):431-440.

[1043] Di Como, C J, Arndt, K T. 1996 Nutrients, via the Tor proteins, stimulate the association of Tap42 with type 2A phosphatases. Genes Dev; 10: 1904-1916.

[1044] Dickinson, C D. Slow-growth phenotype of transgenic tomato expressing apoplastic invertase. Plant Physiology February 1991;95(2):420-425.

[1045] Dickman, M B, Park, Y K, Oltersdorf, T, Li, W, Clemente, T, French, R. 2001 Abrogation of disease development in plants expressing animal antiapoptotic genes. Proc Natl Acad Sci USA; 98:6957-6962.

[1046] Dieryck, W, Pagnier, J. Poyart, C, Maarden, M C, Gruber, V, Bournat, P, Baudino, S, Merot, B. 1997 Human haemoglobin from transgenic tobacco. Nature;386(6620):29-30.

[1047] Dieterle, M, Zhou, Y C, Schafer, E, Funk, M, Kretsch, T. 2001 EID1, an F-box protein involved in phytochrome A-specific light signaling. Genes Dev;15:939-944.

[1048] Dietrich, R A, Richberg, M H, Schmidt, R, Dean, C, Dangl, J L. 1997 A novel zinc finger protein is encoded by the Arabidopsis LSD1 gene and functions as a negative regulator of plant cell death. Cell;88:685-694.

[1049] Dillon, V M, Overton, J, Grayer, R J, Harborne, J B. 1997 Differences in the phytoalexin response among rice cultivars of difference resistance to blast. Phytochem;44(4):599-603.

[1050] Dixit, R, Nasrallah, J B. 2001 Recognizing self in the self-incompatibility response. Plant Physiol;125:105-108.

[1051] Djajanegara, I, Holtzapffel, R, Finnegan, P M, Hoefnagel, M H, Berthold, D A, Wiskich, J T, Day, D A. 1999 A single amino acid change in the plant alternative oxidase alters the specificity of organic acid activation. FEBS Lett;454:220-224.

[1052] Dodds, P N, Clarke, A E, Newbigin, E. Molecularization of an S-like Rnase of Nicotiana alata that is induced by phosphate starvation. Plant Mol Bio. May 1996;31 :227-238.

[1053] Doebley, J, Wang, R L. Genetics and the evolution of plant form: an example from maize. Cold Spring Harb Symp Quant Biol. 1997;62:361-367.

[1054] Doerner, P, Jorgensen, J E, You, R, Steppuhn, J, Lamb, C. 1996 Control of root growth and development by cyclin expression. Nature Apr. 11, 1996;380(6574):520-523.

[1055] Doerner, P. 2000 Plant stem cells: The only constant thing is change. Curr Biol;10:R826-829.

[1056] Dooner, H K, Robbins, T P, Jorgenssen, R A. 1991 Genetic and developmental control of anthocyanin biosynthesis. Ann. Rev. Genet;25:173-200.

[1057] Doulis, A, Debian, N, Kingston-Smith, A, Foyer, C. 1997 Characterization of chilling sensitivity in maize: differential localization of antioxidants in maize leaves. Plant Physiol;114:1031-1037.

[1058] Dove, S. K., Cooke, F. T., Douglas, M. R., Sayers, L. G., Parker, P. J., Michell, R. H. 1997 Osmotic stress activates phosphatidylinositol-3,5-bisphosphate synthesis. Nature;390: 187-192.

[1059] Dresselhaus, T, Cordts, S, Lorz, H. 1999 A transcript encoding translation initiation factor eIF-5A is stored in unfertilized egg cells of maize. Plant Mol Biol;39:1063-1071.

[1060] Drobak, B. K. & Watkins, P. A. 2000 Inositol (1,4,5) trisphosphate production in plant cells: an early response to salinity and hyperosmotic stress. FEBS Lett;481: 240-244.

[1061] Duff, S M G, Guy, P A, Nie, X, Durnin, D C, Hill, R D. Haemoglobin expression in germinating barley. Seed Sci. Res. December 1998;8(4):431-436.

[1062] Duff, S M G, Wittenberg, J B, Hill, R D. Expression, purification, and properties of recombinant barley. J. Biol. Chem. Jul. 4, 1997;272(27):16746-16752.

[1063] Duina, A A, Kalton, H M, Gaber, R F. 1998 Requirement for Hsp9O and a CyP-40-type cyclophilin in negative regulation of the heat shock response. J Biol Chem;273:18974-18978.

[1064] Duncan, W G. 1971 Leaf angles, leaf area and canopy photosynthesis. Crop Sci;11:482-485.

[1065] Duangploy, S, Zuber, M S and Cumbie, B G. Inheritance of Multiple Aleurone Layering. MGCNL 50:90-91.

[1066] Dunn, M. A., Brown, K., Lightowlers, R., Hughes, M. A., A low-temperature responsive gene from barley encodes a protein with single-stranded nucleic acid-binding activity which is phosphorylated in vitro. Plant Mol. Biol. 1996, 30(5):947-959.

[1067] Dure, L. 1993 The Lea proteins of higher plants. Control of Plant Gene Expression, CRC Press, Inc. Boca Raton, Fla. Pages:325-335.

[1068] Dure, L. 1993 A repeating 11-mer amino acid motif and plant desiccation. Plant J;3:363-369.

[1069] Duvick, D N. 1984 Genetic contributions to yield gains of US. hybrid maize, 1930 to 1980. Genetic contributions to yield gains of five major crop plant. CSSA Special Publication Number 7 pg.15-49.

[1070] Easterling, D R, Meehl, G A, Parmesan, C, Changnon, S A, Karl, T R, Meams, L O. Climate extremes: observations, modeling, and impacts. Science Sep. 22, 2000;289(5487):2068-2074.

[1071] Edwards, D, Murray, J A H, Smith, A G. 1998 Multiple genes encoding the conserved CCAAT-box transcription factor complex are expressed in Arabidoipsis. Plant Physiol;117:1015-1022.

[1072] Edwards, G E, Baker, N R. 1993 Can CO2 assimilation in maize leaves be predicted accurately from chlorophyll fluorescence analysis? Photosynth Res;37:89-92.

[1073] Elliger, C A, Chan, B C, Waiss, A C. 1980a Flavonoids as larval growth inhibitors. Naturwissenschaften;67:358-360.

[1074] Elliger, C A, Chan, B G, Waiss, A C Jr, Ludlin, R E, Haddon, W F. 1980b C-Glycosylflavones from Zea mays that inhibit insect development. Phytochem;19(2):293-297.

[1075] Ellis, J G, Llewellyn D J, Walker, J C, Dennis, E S, Peacock, W J. The ocs element: a 16 base pair palindrome essential for activity of the octopine synthase enhancer. EMBO Journal 1987;6(11):3203-3208.

[1076] El-Metainy, A Y, Omar, A A. 1981 Biochemical genetics of Zea mays L. I. Isozymes and the linkage relationship between AP-1 and AP-2 loci. Biochem Genet;19:635-640.

[1077] Elthon, T E, Nickels, R L, McIntosh, L. 1989 Monoclonal antibodies to the alternative oxidase of higher plant mitochondria. Plant Physiol 89:1311-1317.

[1078] Emes, M J, Neuhaus, H E. 1998 Metabolism and transport in non-photosynthetic plastids. J. Exp. Bot;48:1995-2005.

[1079] Emi T, Kinoshita T, Shimazaki Ki K. 2001 Specific Binding of vf14-3-3a Isoform to the Plasma Membrane H(+)-ATPase in Response to Blue Light and Fusicoccin in Guard Cells of Broad Bean. Plant Physiol.125:1115-1125.

[1080] Emmler, K, Stockhaus, J, Chua, N H, Schafer, E. 1995 An amino-terminal deletion of rice phytochrome A results in a dominant negative suppression of tobacco phytochrome A activity in transgenic tobacco seedlings. Planta;197:103-110.

[1081] English, D. 1996 Phosphatidic acid: A lipid messenger involved in intracellular and extracellular signaling. Cell. Signaling;8:341-347.

[1082] English, D., Cui, Y., and Siddiqui, R. A. 1996 Messenger functions of phosphatidic acid. Chem. Phys. Lipids;80:117-132.

[1083] Escoubas, J M, Lomas, M, LaRoche, J, Falkowski, P G. Light intensity regulation of cab gene transcription is signaled by the redox state of the plastoquinone pool. Proc. Natl. Acad. Sci, USA; Oct. 24, 1995;92(22):10237-10241.

[1084] Espineda, C E, Linford, A S, Devine, D, Brusslan, J A. The AtCAO gene, encoding chlorophyll a oxygenase, is required for chlorophyll b synthesis in Arabidopsis thaliana. Proc. Natl. Acad. Sci, USA; Aug. 31, 1999;96(18):10507-10511.

[1085] Eulgem T, Rushton P J, Robatzek S, Somssich I E. 2000 The WRKY superfamily of plant transcription factors. Trends Plant Sci;5:199-206.

[1086] Eulgem, T et al 1999: Early nuclear events in plant defence signalling: rapid gene activation by WRKY transcription factors. EMBO.J, 18: 4689-4699.

[1087] Evans, M, Poethig, R. Gibberellins promote vegetative phase change and resproductive maturity in maize. Plant Physiology 1995; 108(2):475-487.

[1088] Ezaki, B, Gardner, R C, Ezaki, Y, Matsumoto, H. 2000 Expression of aluminum-induced genes in transgenic arabidopsis plants can ameliorate aluminum stress and/or oxidative stress. Plant Physiol;122:657-665.

[1089] Ezekiel, U R, Zassenhaus, H P. 1993 Localization of a cruciform cutting endonuclease to yeast mitochondria. Mol Gen Genet;240:414-418.

[1090] Faiss, M, Zalubilova, J, Strnad, M, Schmulling, T. 1997 Conditional transgenic expression of the ipt gene indicates a function for cytokinins in paracrine signaling in whole tobacco plants. Plant J;12:401-415.

[1091] Fan L, Zheng S, Wang X. 1997 Antisense suppression of phospholipase D alpha retards abscisic acid- and ethylene-promoted senescence of postharvest Arabidopsis leaves. Plant Cell;9:2183-2196.

[1092] Farese, R V, Jr, Herz, J. 1998 Cholesterol metabolism and embryogenesis. Trends Genet;3:115-120.

[1093] Farmer, E E, Weber, H, Vollenweider, S. 1998 Fatty acid signaling in Arabidopsis. Planta;206:167-174.

[1094] Farras, R, Ferrando, A, Jasik, J, Kleinow, T, Okresz, L, Tiburcio, A, Salchert, K, del Pozo, C, Schell, J, Koncz, C. 2001 SKP1-SnRK protein kinase interactions mediate proteasomal binding of a plant SCF ubiquitin ligase. EMBO J;20:2742-2756.

[1095] Faure, J D, Gingerich, D, Howell, S H. 1998 An Arabidopsis immunophilin, AtFKBP12, binds to AtFIP37 (FKBP interacting protein) in an interaction that is disrupted by FK506. Plant J;15:783-789.

[1096] Fennoy, S L, Bailey-Serres, J. Synonymous codon usage in Zea mays L. nuclear genes is varied by levels of C and G-ending codons. Nucleic Acids Res. Nov. 25, 1993;21(23):5294-5300.

[1097] Fernandez, D E, Heck, G R, Perry, S E, Patterson, S E, Bleecker, A B, Fang, S C. 2000 The embryo MADS domain factor AGL15 acts postembryonically. Inhibition of perianth senescence and abscission via constitutive expression. Plant Cell;12:183-198.

[1098] Fernandez-Larrea, J, and Stahl, U. 1996 Isolation and characterization of a laccase gene from Podospora anserina. Mol. Gen. Genet;252:539-551.

[1099] Finlayson, S A, Lee, I J, Mullet, J E, Morgan, P W. 1999 The mechanism of rhythmic ethylene production in sorghum. The role of phytochrome B and simulated shading. Plant Physiol;119:1083-1089.

[1100] Finnegan, P M, Whelan, J, Millar, A H, Zhang, Q, Smith, M K, Wiskich, J T, Day, D A. 1997 Differential expression of the multigene family encoding the soybean mitochondrial alternative oxidase. Plant Physiol;114:455-466.

[1101] Finnemann, J, Schjoerring, J K. 2000 Post-translational regulation of cytosolic glutamine synthetase by reversible phosphorylation and 14-3-3 protein interaction. Plant J;24:171-181.

[1102] Fling et al., Nucleic Acids Res., Oct. 11, 1985; 13(19): 7095-7106

[1103] Fobis-Loisy, I, Loridon, K, Lobreaux, S, Lebrun, M and Briat, J F. Structure and differential expression of two maize ferritin genes in response to iron and abscisic acid. European J. Biochem. Aug. 1, 1995;231(3),609-619.

[1104] Foissner, I, Wendehenne, D, Langebartels, C, Durner, J. 2000 Technical Advance: In vivo imaging of an elicitor-induced nitric oxide burst in tobacco. Plant J;23:817-824.

[1105] Forchhammer, K, Tandeau, de Marsac N. 1995 Phosphorylation of the PII protein (glnB gene product) in the cyanobacterium Synechococcus sp. strain PCC 7942: analysis of in vitro kinase activity. J Bacteriol;177(20):5812-5817.

[1106] Foster, T, Veit, B. Hake, S. 1999b Mosaic analysis of the dominant mutant, Gnarleyl-R, reveals distinct lateral and transverse signaling pathways during maize leaf development. Development; 126:305-313.

[1107] Foster, T, Yamaguchi, J, Wong, B C, Veit, B, Hake, S. 1999a Gnarleyl is a dominant mutation in the knox4 homeobox gene affecting cell shape and identity. Plant Cell;11:1239-1252.

[1108] Foyer, C H, Valadier, M -H, Migge, A, Becker, T W. 1998 Drought-induced effects on nitrate reductase activity and mRNA and on the coordination of nitrogen and carbon metabolism in maize leaves. Plant Physiol;117:283-292.

[1109] Frankel A, and Clarke S. 1999 RNase treatment of yeast and mammalian cell extracts affects in vitro substrate methylation by type I protein arginine N-methyltransferases. Biochem Biophys Res Commun. 259:391-400.

[1110] Frankel A, and Clarke S. 2000 PRMT3 is a distinct member of the protein arginine N-methyltransferase family J Biol Chem. 2000 275:32974-82.

[1111] Fraser A G, James C, Evan G I, Hengartner M O. 1999 Caenorhabditis elegans inhibitor of apoptosis protein (IAP) homologue BIR-1 plays a conserved role in cytokinesis. Curr Biol;9:292-301.

[1112] Frey, M, Stettner, C, Pare, P W, Schmelz, E A, Tumlinson, J H, Gierl, A. An herbivore elicitor activates the gene for indole emission in maize. Proc Natl Acad Sci USA Dec. 19, 2000; 97(26):14801-14806.

[1113] Friedrichsen, D M, Joazeiro, C A, Li, J, Hunter, T, Chory, J. 2000 Brassinosteroid-insensitive-1 is a ubiquitously expressed leucine-rich repeat receptor Serine/Threonine kinase. Plant Physiol; 123:1247-1256.

[1114] Fryer, M J, Oxborough, K, Martin, B, Ort, D R, Baker, N R. 1995 Factors associated with depression of photosynthetic quantum efficiency in maize at low growth temperature. Plant Physio;108:761-767.

[1115] Fu, H, Doelling, J H, Rubin, D M, Vierstra, R D. 1999 Structural and functional analysis of the six regulatory particle triple-A ATPase subunits from the Arabidopsis 26S proteasome. Plant J; 18:529-539.

[1116] Fujimoto, S Y, Ohta, M, Usui, A, Shinshi, H, Ohme-Takagim, M. Arabidopsis ethylene-responsive element binding factors act as transcriptional activators or repressors of GCC box-mediated gene expession. Plant Cell March 2000;12(3):393-404.

[1117] Fujisawa, Y, Kato, T, Ohki, S, Ishikawa, A, Kitano, H, Sasaki, T, Asahi, T, Iwasaki, Y. 1999 Suppression of the heterotrimeric G protein causes abnormal morphology, including dwarfism, in rice. Proc Natl Acad Sci USA;96:7575-7580.

[1118] Furini, A., Koncz, C., Salamini, F., and Bartels, D. 1997 High level transcription of a member of a repeated gene family confers dehydration tolerance to callus tissue of Craterostigma plantagineum. EMBO J: 16:3599-3608.

[1119] Gachotte, D, Meens R, and Benveniste, P. 1995. An Arabidopsis mutant deficient in sterol biosynthesis: Heterologous complementation by ERG3 encoding a 7-sterol-C-5-desaturase from yeast. Plant J;8:407-416.

[1120] Gagne, J, Shiu, S, Downes, B P, Vierstra, R D 2001 Genome analysis of the SCF and HECT E3 families in Arabidopsis thaliana. 12^{th} International Conference on Arabidopsis Research. Abstract 78.

[1121] Gahrtz, M, Schmelzer, E, Stolz, J, Sauer, N. 1996 Expression of the PmSUC1 sucrose carrier gene from Plantago major L. is induced during seed development. Plant J;9:93-100.

[1122] Gahrtz, M, Stolz, J, and Sauer, N. 1994 A phloem-specific sucrose H⁺ symporter from Plantago major L. supports the model of apoplastic phloem loading. Plant J;6:697-706.

[1123] Gallego, P P, Whotton, L, Picton, S, Grierson, D, Gray, J E. 1995 A role for glutamate decarboxylase during tomato ripening: the characterisation of a cDNA encoding a putative glutamate decarboxylase with a calmodulin-binding site. Plant Mol Biol;27:1143-1151.

[1124] Gan, S, Amasino, R M. (1995) Inhibition of leaf senescence by autoregulated production of cytokinin. Science;270: 1986-1988.

[1125] Gao, X D, Kaigorodov, V, Jigami, Y. 1999 YND1, a homologue of GDA1, encodes membrane-bound apyrase required for Golgi N- and O-glycosylation in Saccharomyces cerevisiae. J Biol Chem July 23;274(30):21450-21456.

[1126] Garay-Arroyo, A, Colmenero-Flores, J M, Garciarrubio, A, Covarrubias, A A. 2000 Highly hydrophilic proteins in prokaryotes and eukaryotes are common during conditions of water deficit. J Biol Chem;275:5668-5674.

[1127] Garay-Arroyo, A, Colmenero-Flores, J M, Garciarrubio, A, Covarrubias, A A. 2000 Highly hydrophilic proteins in prokaryotes and eukaryotes are common during conditions of water deficit. J Biol Chem;25;275:5668-5674.

[1128] Garlid, K D, Orosz, D E, Modriansky, M, Vassanelli, S, Jezek, P. On the mechanism of fatty acid-induced proton transport by mitochondrial uncoupling protein. J. Biol. Chem. Feb. 2, 1996; 271 (5):2615-2620.

[1129] Gasior, S L, Wong, A K, Kora, Y, Shinohara, A, Bishop, D K. 1998 Rad52 associates with RPA and functions with rad55 and rad57 to assemble meiotic recombination complexes. Genes Dev;12:2208-2221.

[1130] Gaur, G M, Kochlar, A, Maheshwar, S C, Tyagi, A K. 1999 Nucleotide sequence of psbQ gene for 16-kDa protein of oxygen evolving complex from Arabidopsis thaliana and regulation of expresssion. DNA Res;6:173-177.

[1131] Gausing, K. A barley gene (rsh1) encoding a ribonculease S-like homologue specifically expressed in young light-grown leaves. Planta March 2000;210(4):574-579.

[1132] Gaxiol, R., Rao, R., Sherman, A., Grisafi, P., Alper, S. and Fink, G. 1999 The Arabidopsis thaliana proton tranporters, AtNHX1 and Avp1, can function in cation detoxification in yeast. Pro. Nat. Acad;96:1480-1485.

[1133] Gaymard, F, Boucherez, J, Briat, J -F. Characterization of a ferritin mRNA from Arabidopsis thaliana accumulated in response to iron through an oxidative pathway independent of abscisic acid. Biochemical Journal 1996;318:67-73.

[1134] Geisler, M, Frnagne, N, Gomes, E, Martinola, E, Palmgren, M G. 2000 The ACA4 gene of Arabidopsis encodes a vacuolar membrane calcium pump that improves salt tolerance in yeast. Plant Physiol; 124:1814-1827.

[1135] Gelperin, D, Weigle, J, Nelson, K, Roseboom, P, Irie, K, Matsumoto, K, Lemmon, S. 1995 14-3-3 proteins: potential roles in vesicular transport and Ras signaling in Saccharomyces cerevisiae. Proc Natl Acad Sci USA;92: 11539-11543.

[1136] Gelvin, S. and Schilperoort, R. (1994) Plant Molecular Biology Manual (2nd ed.). Kluwer Academic, Dordrecht

[1137] Genty, B, Briantais, J -M, Baker, N R. 1989 The relationship between the quantum yield of photosynthetic electron transport and quenching of chlorophyll fluorescence. Biochim Biophys Acta;990:87-92.

[1138] Gerbling, K P, Steup, M, Latzko, E. Frusctose 1,6-bisphosphatase Form B from synechococcus leopoliensis Hydrolyzes both fructose and sedoheptulose bisphosphate. Plant Physiol 1986;80(3):716-720.

[1139] Gerday, C, Aittaleb, M, Bentahir, M, Chessa, J P, Claverie, P, Collins, T, D'Amico, S, Dumont, J, Garsoux, G, Georlette, D, Hoyoux, A, Lonhienne, T, Meuwis, M A, Feller, G. Cold-adapted enzymes: from fundamentals to biotechnology. Trends Biotechnol March 2000;18(3):103-107.

[1140] Giaquinta, R T. 1983 Phloem loading of sucrose. Annu. Rev. Plant Physiol;34:347-387.

[1141] Gidrol, X, Sabelli, P A, Fern, Y S, Kush, A K. 1996 Annexin-like protein from Arabidopsis thaliana rescues delta oxyR mutant of Escherichia coli from H2O2 stress. Proc Natl Acad Sci USA; 93:11268-11273.

[1142] Gierl, A, Frey, M. 1999 The hydroxamic acid pathway. Novartis Found Symp;223:150-157.

[1143] Gifford, R M, Evans, L T. 1981 Photosynthesis, carbon partitioning and yield. Annu. Rev. Plant Physiol;32:485-509.

[1144] Gillikin, J W, Zhang, F, Coleman, C E, Bass, H W, Larkins, B A, Boston, R S. 1997 A defective signal peptide tethers the floury-2 zein to the endoplasmic reticulum membrane. Plant Physiol;114(1):345-352.

[1145] Gillissen, B, Burkle L, Andre, B, Kuhn, C, Rentsch, D, Brandl, B, Frommer, W B. A new family of high-affinity transporters for adenine, cytosine, and purine derivatives in Arabidopsis. Plant Cell February 2000;12(2):291-300.

[1146] Gingras, A C, Raught, B, Sonenberg, N. 1999 eIF4 initiation factors: effectors of mRNA recruitment to ribosomes and regulators of translation. Annu Rev Biochem;68:913-963.

[1147] Gipp W F, Cline T R, Rogler J C. 1968 The metabolizable energy of opaque-2 and floury-2 corn for the chick. Poult Sci.47(6):2018-2021.

[1148] Girvin, M E, Rastogi, V K, Abildgaard, F, Markley, J L, Fillingame, R H. 1998 Solution structure of the transmembrane H+-transporting subunit c of the FlFo ATP synthase. Biochem;37:8817-8824.

[1149] Glover, J R, Lindquist, S. 1998 Hsp104, Hsp70, and Hsp40: a novel chaperone system that rescues previously aggregated proteins. Cell;94:73-82.

[1150] Goetz, M, Godt, D E, Roitsch, T. 2000. Tissue-specific induction of the mRNA for an extracellular invertase isoenzyme of tomato by brassinosteroids suggests a role for steroid hormones in assimilate partitioning. Plant J;22:515-522.

[1151] Gogarten, J P, Bentrup, F W. 1989 Substrate specificity of the hexose carrier in the plasma membrane of Chenopodium suspension cells probes by transmembrane exchange diffusion. Planta; 178:52-60.

[1152] Gomes, E, Jakobsen, M K, Axelsen, K B, Geisler, M, Palmgren, M G. 2000 Chilling tolerance in Arabidopsis involves ALA1, a member of a new family of putative aminophospholipid translocases. Plant Cell; 12:2441-2453.

[1153] Gomez-Gomez, L, Boller, T. 2000 FLS2: an LRR receptor-like kinase involved in the perception of the bacterial elicitor flagellin in Arabidopsis. Mol Cell;5:1003-1011.

[1154] Gonzalez-Barroso, M M, Fleury, C, Bouillaud, F, Nicholls, D G, Rial, E. 1998. The Uncoupling Protein UCP1 Does Not Increase the Proton Conductance of the Inner Mitochondrial Membrane by Functioning as a Fatty Acid Anion Transporter. J of Biol. Chem; 273:15528-15532.

[1155] Goodrich, J, Puangsomlee, P, Martin, M, Long, D, Meyerowitz, E M, Coupland, G. 1997 A Polycomb-group gene regulates homeotic gene expression in Arabidopsis. Nature;386:44-51.

[1156] Gordon, E D, Mora, R., Meredith, S C, Lee, C. and Lindquist, S. L. 1987 Eukaryotic initiation factor 4D, the hypusine-containing protein, is conserved among eukaryotes. J. Biol. Chem;262:16585-16589.

[1157] Gorschen, E. Dunaeva, M, Hause, B, Reeh, I, Wasternack, C, Parthier, B. 1997 Expression of the ribosome-inactivating protein JIP60 from barley in transgenic tobacco leads to an abnormal phenotype and alterations on the level of translation. Planta;202:470-478.

[1158] Gosti, Francoise, Beaudoin, Nathalie, Serizet, Carine, Webb, Alex A R, Vartanian, Nicloe and Giraudat, Jerome. ABI1 Protein Phosphatase 2C is a nagative regulator of Abscisic acid signaling. The Plant Cell; 11:1897-1909, 1999.

[1159] Gottlieb, E and Steitz, J A. 1989 Function of the mammalian La protein: evidence for its action in transcription termination by RNA polymerase III. EMBO J;8:851-861.

[1160] Gouvea, C M C P. 1997 NO-releasing substances that induce growth elongation in maize root segments. Plant growth regulation; 21:183-187.

[1161] Gray, J, Close, P S, Briggs, S P, Johal, G S. 1997 A novel suppressor of cell death in plants encoded by the Lls1 gene of maize. Cell; 89:25-31.

[1162] Gray, W M, del Pozo, J C, Walker, L, Hobbie, L, Risseeuw, E, Banks, T, Crosby, W L, Yang, M, Ma, H, Estelle, M. 1999 Identification of an SCF ubiquitin-ligase complex required for auxin response in Arabidopsis thaliana. Genes Dev; 13:1678-1691.

[1163] Grayer, R J, Harborne, J B, Overton, J, Dillon, V M. 1995 Flavonoid phytoalexins and resistance of rice plants against the rice blast fungus, Pyricularia oryzae. In: Flavonoids and Bioflavonoids, eds S. Antus, M. Gabor and K. Vetschera. Akademia Kiado,Budapest, pp. 119.

[1164] Green, B R, Durnford, D G. 1996 The chlorophyll-carotenoid proteins of oxygenic photosynthesis. Ann. Rev. Plant Physio. Plant Mol. Biol;47:685-714.

[1165] Grossniklaus, U, Vielle-Calzada, J P, Hoeppner, M A, Gagliano, W B. 1998 Maternal control of embryogenesis by MEDEA, a polycomb group gene in Arabidopsis. Science;280:446-450.

[1166] Guddat, U, Bakken, A H, Pieler, T. 1990 Protein-mediated nuclear export of RNA: 5S rRNA containing small RNPs in xenopus oocytes. Cell;60:619-628.

[1167] Gunawardena, A H, Pearce, D M, Jackson, M B, Hawes, C R, Evans, D E. 2001 Characterisation of programmed cell death during aerenchyma formation induced by ethylene or hypoxia in roots of maize (Zea mays L.). Planta;212:205-214.

[1168] Gupta, A S, Heinen, J L, Holaday, A S, Burke, J J, Allen, R D. 1993 Increased resistance to oxidative stress in transgenic plants that overexpress chloroplastic Cu/Zn superoxide dismutase. Proc Natl Acad Sci USA;90:1629-1633.

[1169] Hageman, R H, Lambert, R J. 1988 The use of physiological traits for corn improvement. In: Corn and corn improvement, 3^{rd} edition. Sprague G F and Dudley J W eds. Pg 431-461.

[1170] Hahn, D, Kuck, U. Necleotide sequence of a cDNA encoding the chloroplast sedpheptulose-1,7-bisphosphatase from chlamydomonas reinhardtii. Plant Physiol 1994;104(3):1101-1102.

[1171] Halleck, M S, Pradhan, D, Blackman, C, Berkes, C, Williamson, P, Schlegel, R A. 1998 Multiple members of a third subfamily of P-Type ATPases identified by genomic sequences and ESTs. Gen Res;8(4):354-361.

[1172] Halliday, K J, Hudson, M, Ni, M, Qin, M, Quail, P H. 1999b poc1: an Arabidopsis mutant perturbed in phytochrome signaling because of a T DNA insertion in the promoter of PIF3, a gene encoding a phytochrome-interacting bHLH protein. Proc Natl Acad Sci USA; 96:5832-5837.

[1173] Halliday, K J, Thomas, B, Whitelam, G C. 1997 Expression of heterologous phytochromes A, B or C in transgenic tobacco plants alters vegetative development and flowering time. Plant J;12:1079-1090.

[1174] Hamilton, C M, Frary, A, Lewis, C, Tanksley, S D. Stable transfer of intact high molecular weight DNA into plant chromosomes. Proc Natl Acad Sci USA Sep. 3, 1996;93(18):9975-9979.

[1175] Hanai, H, Matsuno, T, Yamamoto, M, Matsubayashi, Y, Kobayashi, T, Kamada, H, Sakagami, Y. 2000 A secreted peptide growth factor, phytosulfokine, acting as a stimulatory factor of carrot somatic embryo formation. Plant Cell Physiol;41 :27-32.

[1176] Hanai, H, Nakayama, D, Yang, H, Matsubayashi, Y, Hirota, Y, Sakagami, Y. 2000 Existence of a plant tyrosylprotein sulfotransferase: novel plant enzyme catalyzing tyrosine O-sulfation of preprophytosulfokine variants in vitro. FEBS Lett;470:97-101.

[1177] Hanauske-Abel, H M, Park, M H, Hanauske, A R, Popowicz, A M, Lalande, M, Folk, J E. 1994 Inhibition of the G1-S transition of the cell cycle by inhibitors of deoxyhypusine hydroxylation. Biochim Biophys Acta;1221 :115-124.

[1178] Hannoufa, A, Negruk, V, Eisner, G, Lemieux, B. The CER3 gene of Arabidopsis thaliana is expressed in leaves, stems, roots, flowers and apical meristems. Plant J. Sep. 1996;10(3):459-467. PMID: 8811860; UI: 96407843.

[1179] Hansen, G. 2000 Evidence for Agrobacterium-induced apoptosis in maize cells. Mol Plant Microbe Interact;13:649-657.

[1180] Hansen, C. H., Wittstock, U., Olsen, C. E., Hick, A. J., Pickett, J. A., and Halkier, B. A. 2001. Cytochrome P450 CYP79F1 from Arabidopsis catalyzes the conversion of dihomomethionine and trihomomethionine to the corresponding aldoximes in the biosynthesis of aliphatic glucosinolates. J. Biol. Chem;276:11078-11085.

[1181] Hansen, J D, Pyee, J, Xia, Y, Wen, T J, Robertson, D S, Kolattukudy, P E, Nikolau, B J and Schnable, P S. The glossyl locus of maize and an epidernis-specific cDNA from Kleinia odora define a class of receptor-like proteins required for the normal accumulation of cuticular waxes. Plant Physiol. 1997; 113:1091-1100.

[1182] Hanumappa, M, Pratt, L H, Cordonnier-Pratt, M M, Deitzer, G F. 1999 A photoperiod-insensitive barley line contains a light-labile phytochrome B. Plant Physiol;119:1033-1040.

[1183] Hara, K, Yagi, M, Kusano, T, Sano, H. 2000 Rapid systemic accumulation of transcripts encoding a tobacco WRKY transcription factor upon wounding. Mol Gen Genet;263 :30-37.

[1184] Haran, S, Logendra, S, Seskar, M, Bratanova, M, Raskin, I. 2000 Characterization of Arabidopsis Acid Phosphatase Promoter and Regulation of Acid Phosphatase Expression. Plant Physiol;124:615-626.

[1185] Hardtke, C S, Gohda, K, Osterlund, M T, Oyama, T, Okada, K, Deng, X W. 2000 HY5 stability and activity in arabidopsis is regulated by phosphorylation in its COP1 binding domain. EMBO J;19:4997-5006.

[1186] Hareven, D, Gutfinger, T, Parnis, A, Eshed, Y, Lifschitz, E. 1996 The making of a compound leaf: genetic manipulation of leaf architecture in tomato. Cell;184:735-744.

[1187] Hamdahl, U, Hall, R B, Osteryoung, K W, Vierling, E, Bormnan, J F, Sundby, C. 1999 The chloroplast small heat shock protein undergoes oxidation-dependent conformational changes and may protect plants from oxidative stress. Cell Stress Chaperones;4:129-138.

[1188] Harper, J F, Hong, B, Hwang, I, Guo, H Q, Stoddard, R, Huang, J F, Palmgren, MG, Sze, H. A novel calmodulin-regulated Ca2+-ATPase (ACA2) from Arabidopsis with an N-terminal authinhibitory domain. J Biol Chem Jan. 9, 1998; 273(2):1099-1106.

[1189] Harrington, G N, Franceschi, V R, Offler, C E, Patrick, J W, Harper, J F, Frommer, W B, Tegeder, M, and Hitz, W D. 1997 Cell specific expression of three genes involved in plasma membrane sucrose transport in developing Vicia faba seed. Protoplasma;197:160-173.

[1190] Harris, D M, Myrick, T L, Rundle, S J. 1999 The Arabidopsis homolog of yeast TAP42 and mammalian alpha4 binds to the catalytic subunit of protein phosphatase 2A and is induced by chilling. Plant Physiol;121 :609-617.

[1191] Harrison, Willingham, Lloyd, Raines. Reduced sedoheptulose-1,7-bisphosphatase levels in transgenic tobacco lead to decreased photosynthetic capacity and altered carbohydrate accumulation. Planta 1998; 204(1):27-36.

[1192] Hartmann, U, Hohmann, S, Nettesheim, K, Wisman, E, Saedler, H, Huijser, P. Molecular cloning of SVP: a negative regulator of the floral transition in Arabidopsis. Plant J February 2000; 21(4):351-360.

[1193] Hartwick, L. M., Llewellyn, D. J. and Dennis, E. S. 1997 The Arabidopsis thaliana genome has multiple divergent forms of phosphatidylinositol-specific phospholipase C. Gene;202:151-156.

[1194] Hasegawa, P M, Bressan, R A, Zhu, J-., Bohnert, H J. 2000 Plant cellular and molecular responses to high salinity. Annu. Rev. Plant Physiol. Plant Mol. Biol;51:463499.

[1195] Haseloff, J, Siemering, K R, Prasher, D C, Hodge, S. Removal of a cryptic intron and subcellular localization of green fluorescent protein are required to mark transgenic Arabidopsis plants brightly. Proc Natl Acad Sci USA Mar. 18, 1997; 94(6):2122-2127.

[1196] Haseloff, J. GFP variants for multispectral imaging of living cells. Methods Cell Biology, 1999;58;139-151.

[1197] Hashizume, R, Fukuda, M, Maeda, I, Nishikawa, H, Oyake, D, Yabuki, Y, Ogata, H, Ohta, T. 2001 The RING heterodimer BRCA1-BARD1 is a ubiquitin ligase inactivated by a breast cancer-derived mutation. J Biol Chem.276:14537-14540.

[1198] Hatakeyama, S, Yada, M, Matsumoto, M, Ishida, N, Nakayama, K I. 2001 U-Box proteins as a new family of ubiquitin-protein ligases. J Biol Chem. In press

[1199] Havaux, M, Niyogi, K K. 1999 The violaxanthin cycle protects plants from photooxidative damage by more than one mechanism. Proc Natl Acad Sci USA;96:8762-8767.

[1200] Haydon, M S, Googe, J D, Sorrells, D S, Ghali, G E, Li, B D. 2000 Progression of eIF4e gene amplification and overexpression in benign and malignant tumors of the head and neck. Cancer;88:2803-2810.

[1201] Hayes, et al. Nucleic Acid Hybridizaiton, A Practical Approach, IRL Press, Washington D.C., 1985.

[1202] He, C, Fong, S H, Yang, D, Wang, G L. 1999 BWMK1, a novel MAP kinase induced by fungal infection and mechanical wounding in rice. Mol Plant Microbe Interact;December;12(12):1064-1073.

[1203] He, Y, Tang, W, Swain, J D, Green, A L, Jack, T P, Gan, S. 2001 Networking senescence-regulating pathways by using arabidopsis enhancer trap lines. Plant Physiol;126:707-716.

[1204] He, Z, Zhu, Q, Dabi, T, Li, D, Weigel, D, Lamb, C. 2000 Transformation of rice with the Arabidopsis floral regulator LEAFY causes early heading. Transgenic Res;9:223-227.

[1205] He, Z, Wang, Z, Li J, Zhu, Q, Lamb, C, Ronald, P, Chory, J. 2000. Perception of Brassinosteroids by the Extracellular Domain of the Receptor Kinase BRI1. Science;288:2360-2363.

[1206] Heidkamper, D, Mtiller, V, Nelson, D R, Klingenberg, M. 1996 Probing the role of positive residues in the ADP/ATP carrier from yeast. The effect of six arginine mutations on transport and the four ATP versus ADP exchange modes. Biochem;35,16144-16152.

[1207] Heim, D, Nicholson, R L, Pascholati, S F, Hagerman, A E, Billet, W. 1993 Etiolated maize mesocotyls: A tool for investigating disease interactions. Phytopathol;73:424-428.

[1208] Helin, K, Wu, C L, Fattaey, A R, Lees, J A, Dynlacht, B D, Ngwu, C, Harlow, E. 1993 Heterodimerization of the transcription factors E2F-1 and DP-1 leads to cooperative trans-activation. Genes Dev;7:1850-1861.

[1209] Helliwell, S B, Losko, S, Kaiser, C A. 2001 Components of a ubiquitin ligase complex specify polyubiquitination and intracellular trafficking of the general amino acid permease. J Cell Biol;153:649-662.

[1210] Hershey, J W. Expression of initiation factor genes in mammalian cells. Biochimie. 1994; 76(9):847-852. Review.

[1211] Heyer, A G, Mozley, D, Landschutze, V, Thomas, B, Gatz, C. 1995 Function of phytochrome A in potato plants as revealed through the study oftransgenic plants. Plant Physiol;109:53-61.

[1212] Higgins, C F. ABC transporters: from micro-organisms to man. Annu.Rev.Cell Biol 1992;8:67-113.

[1213] Higo, K, Ugawa, Y, Iwamoto, M and Korenaga, T 1999 Plant cis-acting regulatory DNA elements (PLACE) database. cleic Acids Research;27(1):297-300.

[1214] Hinchee, M A, Connor-Ward, D V, Newell, C A, McDonnell, R E, Sato, S J, Casser, C S, Fischhoff, D A, Re, D B, Fraley R T, Horsch, R B. Production of transgenic soybean plants using Agrobacterium-mediated DNA transfer. Bio/Technology August 1988;6:915-922.

[1215] Hinderhofer, K, Zentgraf, U. 2001 Identification of a transcription factor specifically expressed at the onset of leaf senescence. Planta;213:469-473.

[1216] Hipskind, J, Wood, K, Nicholson, R L. 1996 Localized stimulation of anthocyanin accumulation and delineation of pathogen ingress in maize genetically resistant to Bipolaris maydis race O. Physiol. Mol Plant Pathol;49:247-256.

[1217] Hipskind, J D, Hanau, R, Leite, B, Nicholson, R L. 1990 Phytoalexin accumulation in Sorghum: Identification of an apigeninidin acyl ester. Physiol. Mol. Plant Pathol;36:381-396.

[1218] Hirasawa, M, Schurmann, P, Jacquot, J P, Manieri, W, Jacquot, P, Keryer, E, Hartman, F C, Knaff, D B. 1999 Oxidation-reduction properties of chloroplast thioredoxins, ferredoxin: thioredoxin reductase, and thioredoxin f-regulated enzymes. Biochemistry;38:5200-5205.

[1219] Hirayama, T, Ohto, C, Mizoguchi, T, and Shinozaki, K. 1995 A gene encoding a phosphatidylinositol-specific phospholipase C is induced by dehydration and salt-stress in Arabidopsis thaliana. Proc. Natl. Acad. Sci. USA;92:3903-3907.

[1220] Hirose, T, Imaizumi, N, Scofield, G N, Furbank, R T, and Ohsugi, R. 1997 cDNA cloning and tissue-specific expression of a gene for sucrose transporter from rice (Oryza sativa L.). Plant Cell Physiol;38:1389-1396.

[1221] Hirschman, J E, Jenness, D D. 1999 Dual lipid modification of the yeast ggamma subunit Ste18p determines membrane localization of Gbetaganmna. Mol Cell Biol;19:7705-7711.

[1222] Hiser, C, Kapranov, P, McIntosh, L. 1996 Genetic modification of respiratory capacity in potato. Plant Physiol;110:277-286.

[1223] Hoeberichts, F A, Orzaez, D, van der Plas, L H, Woltering, E J. 2001 Changes in gene expression during programmed cell death in tomato cell suspensions. Plant Mol Biol;45:641-54.

[1224] Hoecker, U, Tepperman, J M, Quail, P H. 1999 SPA1, a WD-repeat protein specific to phytochrome A signal transduction. Science;284:496-499.

[1225] Hoecker, U, Xu, Y, Quail, P H. 1998 SPA1: a new genetic locus involved in phytochrome A-specific signal transduction. Plant Cell;10:19-33.

[1226] Hoeijmakers, J H, Egly, J M, Vermeulen, W. 1996 NTFIIH: a key component in multiple DNA transactions. Curr Opin Genet Dev;6:26-33.

[1227] Holford, I C R. 1997 Soil phosphorus: its measurement, and its uptake by plants. Aust J Soil Res;35:227-239.

[1228] Hollenbach, B, and Dietz, K -J. 1995 Molecular cloning of emip, a member of the Major Intrinsic Protein (MIP) gene family, preferentially expressed in epidermal cells of barley leaves. Bot. Acta;108:425-431.

[1229] Holmberg, N, Lilius, G, Bailey, J E, Bulow, L. Transgenic tobacco expressing Vitreoscilla hemoglobin exhibits enhanced growth and altered metabolite production. Nature Biotech. March 1997; 15(3):244-247.

[1230] Holmstrom, K, Somersalo, S, Mandal, A, Palva, T, and Welin, B. Improved tolerance to salinity and low temperature in transgenic tobacco producing glycine betaine. Journal of Experimental Botany 2000; 51,343:177-185.

[1231] Honda et al., Gene, Sep. 7, 1988; 68(2) :221-8

[1232] Hong, N A, Kabra, N H, Hsieh, S N, Cado, D, Winoto, A. 1999 In vivo overexpression of Dad1, the defender against apoptotic death-1, enhances T cell proliferation but does not protect against apoptosis. J Immunol;163:1888-1893.

[1233] Hooley, R. Gibberellins: perception, transduction and responses. Plant Mol. Biology December 1994; 26(5):1529-1555.

[1234] Horemans, N. Asard, H, Caubergs, R J. 1998 Carrier mediated uptake of dehydroascorbate into higher plant plasma membrane vesicles shows trans-stimulation. FEBS Lett;421(1):41-44.

[1235] P. Horton, A. V. Ruban, and R. G. Walters 1996 Regulation of light harvesting in green plants. Ann. Rev. Plant Physio. Plant Mol. Biol 47:655-684.

[1236] Houlne, G, and Boutry, M. (1994) Identification of an Arabidopsis thaliana gene encoding a plasma membrane H⁺-ATPase whose expression is restricted to anther tissues. Plant J;5:311-317.

[1237] Hsieh, M H, Lam, H M, van de Loo, F J, Coruzzi, G. 1998 A PII-like protein in Arabidopsis: putative role in nitrogen sensing. Proc Natl Acad Sci USA;95(23):13965-13970.

[1238] Huang, C, Barker, S J, Langridge, P, Smith, F W, Graham, R D. 2000. Zinc Deficiency Up-Regulates Expression of High-Affinity PhosphateTransporter Genes in Both Phosphate-Sufficient and -Deficient Barley Roots. Plant Physiol;124:415-422.

[1239] Huang, J, Hirji, R. Adam, L, Rozwadowski, K L, Hammerlindl, J K, Keller, W A, Selvaraj, G. Genetic engineering of glycine betaine production toward enhancing stress tolerance in plants: metabolic limitations. Plant Physiol. March 2000; 122(3):747-756.

[1240] Huang, S, Cerny, R E, Bhat, D, Brown, S M. (2000) Cloning of an Arabidopsis patatin-like gene, STURDY, by activation T-DNA tagging. Plant Physiol February 2001;125:573-584.

[1241] Huang, S, Kerschbaum, H H, Engel, E, Hermann, A. 1997 Biochemical characterization and histochemical localization of nitric oxide synthase in the nervous system of the snail, Helix pomatia. J Neurochem;69:2516-2528.

[1242] Huberman et al., 1995. Regulation and role of IMPD in cell replication, malignant transformation, and differentiation. In: A. Sahota, M. Taylor (Eds), Purine and Pyrimidine metabolism in Man, Vol. 8, Plenum Press, New York, 1995, pp 741-746.

[1243] Hudak, C M. 1995 Vegetative growth analysis of a drought resistant soybean plant introduction. Crop Science;35:464-471.

[1244] Hudson, M, Ringli, C, Boylan, M T, Quail, P H. 1999 The FAR1 locus encodes a novel nuclear protein specific to phytochrome A signaling. Genes Dev;13:2017-2027.

[1245] Hueros, G, Varotto S, Salamini, F, Thompson, R D. (1995) Molecular characterization of BET1, a gene expressed in the endosperm transfer cells of maize. Plant Cell;7:747-757.

[1246] Hugouvieux, V., Kwak, J. M., Schroeder, J. I., An mRNA cap binding protein, ABH1, modulates early abscisic acid signal transduction in Arabidopsis. Cell 2001,106(4):477-487.

[1247] Husselstein, T. Schaller H, Gachotte D, and Benveniste, P. 1999. Delta7-sterol-C5-desaturase: Molecular characterization and functional expression of wild-type and mutant alleles. Plant Mol. Biol;39:891-901.

[1248] Hutchison, R S, Groom, Q, Ort, D R. 2000 Differential effects of chilling-induced photooxidation on the redox regulation of photosynthetic enzymes. Biochemistry;39:6679-6688.

[1249] Ignarro, L J. 2000 Nitric Oxide : Biology and Pathobiology. Academic Pr; ISBN: 0123704200. Ignatova, L K. Moskvin, O V, Romanova, A K, and Ivanov, B N. 1998 Carbonic anhydrases in the C3-plant leaf cell. Aust. J. Plant Physiol;25:673-677.

[1250] Ikeda Y, Koizumi N, Kusano T, Sano H. 2000 Specific binding of a 14-3-3 protein to autophosphorylated WPK4, an SNF1-related wheat protein kinase, and to WPK4-phosphorylated nitrate reductase. J Biol Chem.275:31695-31700.

[1251] Ikeda, Y, Koizumi, N, Kusano, T, Sano, H. 1999 Sucrose and Cytokinin Modulation of WPK4, a Gene Encoding a SNF1-Related Protein Kinase from Wheat. Plant Physiol;121:813-820.

[1252] Ikuta, N, Souza, M B, Valencia, F F, Castro, M E, Schenberg, A C, Pizzirani-Kleiner, A, Astolfi-Filho, S. The alpha-amylase gene as a marker for gene cloning: direct screening of recombinant clones. Biotechnology (NY) March 1990;8(3):241-242.

[1253] Imai, R, Chang, L, Ohta, A, Bray, E A, Takagi, M. 1996 A lea-class gene of tomato confers salt and freezing tolerance when expressed in Saccharomyces cerevisiae. Gene; 1 70:243-248.

[1254] Imai, J, Yahara, I. 2000 Role of HSP90 in salt stress tolerance via stabilization and regulation of calcineurin. Mol Cell Biol;20:9262-9270.

[1255] Incharoensakdi, A, Matsuda, N, Hibino, T, Meng, Y, Ishikawa, H, Hara, A, Funaguma, T, Takabe, T and Takabe T. Overproduction of spinach betaine aldehyde dehydrogenase in Escerichia coli. European. Journal of Biochemistry 2000;267:7015-7023.

[1256] Issakidis, E, Saarinen, M, Decottignies, P, Jacquot, J P, Cretis, C, et al. 1994 Identification and characterization of the second regulatory disulfide bridge of recombinant sorghum leaf NADP-malate dehydrogenase. J. Biol. Chem;269:3511-3517.

[1257] Issakidis-Bourguet, E, Mouaheb, N, Meyer, Y, Miginiac-Maslow, M. 2001 Heterologous complementation of yeast reveals a new putative function for chloroplast m-type thioredoxin. Plant J;25:127-135.

[1258] Isshiki, T, Mochizuki, N, Maeda T, Yamamoto M. 1992 Characterization of a fission yeast gene, gpa2, that encodes a G alpha subunit involved in the monitoring of nutrition. Genes Dev;6:2455-2462.

[1259] Issinger, O. G 1993 Casein kinases: pleiotropic mediators of cellular regulation. Pharmacol Ther;59(1):1-30.

[1260] Itoh, R, Takan, H, Ohta, N, Miyagishima S, Kuroiwa, H, Kuroiwa, T. Two ftsH-family genes encoded in the nuclear and chloroplast genomes of the primitive red alga Cyanidioschyzon merolae. Plant Mol Bio October 1999;41(3):321-337.

[1261] Iwasaki, T, Shibaoka, H. 1991 Brassinosteroids act as regulators of tracheary-element differentiation in isolated Zinnia mesophyll cells. Plant Cell Physiol;32:1007-1014.

[1262] Izawa, T, Oikawa, T, Tokutomi, S, Okuno, K, Shimamoto, K. 2000 Phytochromes confer the photoperiodic control of flowering in rice (a short-day plant). Plant J;22:391-399.

[1263] Jackson, C, Dench, J, Moore, A L, Halliwell, B, Foyer C H, Hall, D O. 1978 Subcellular localisation and identification of superoxide dismutase in the leaves of higher plants. Eur J Biochem;91 :339-344.

[1264] Jacobs, J S, Anderson, A R, Parker, R P. 1998 The 3′ to 5′ degradation of yeast mRNAs is a general mechanism for mRNA turnover that requires the SK12 DEVH box protein and 3′ to 5′ exonucleases of the exosome complex. EMBO J;17:1497-1506.

[1265] Jaglo-Ottosen, K R, Gilmour, S J, Zarka, D G, Schabenberger, O, Thomashow, M F. 1999 Arabidopsis CBF1 overexpression induces COR genes and enhances freezing tolerance. Science;280(5360):104-106.

[1266] Jambunathan, R, Kherdekar, M S, Bandyopadhay, R. 1990 Flavan 4-ols concentration in mold susceptible and mold resistant Sorghum at different stages of grain development. J. of Agric. and Food Chem;38(2):545.

[1267] Jang, J, Fujioka, S, Tasaka, M, Seto, H, Takatsuto, S, Ishii, A, Aida, M, Yoshida, S, Sheen, J. 2000 A critical role of sterols in embryonic patterning and meristem programming revealed by fackel mutants of Arabidopsis thaliana. Gen. Dev;14:1485-1497.

[1268] Jansson, B P, Malandrin, L, Johansson, H E. 2000 Cell cycle arrest in archaea by the hypusination inhibitor N(1)-guanyl-1,7-diaminoheptane. J Bacteriol;182:1158-1161.

[1269] Jarmuszkiewicz, W, Almeida, A M, Sluse-Goffart, C M, Sluse, F E, Vercesi, A E. 1998 Linoleic Acid-induced Activity of Plant Uncoupling Mitochondrial Protein in Purified Tomato Fruit Mitochondria during Resting, Phosphorylating and Progressively Uncoupled Respiration. J. of Biol. Chem;273:34882-34886.

[1270] Jasinski, M, Stukkens, Y, Degand, H, Purnelle, B, Marchand-Brynaert, J, Boutry, M. A plant plasma membrane ATP binding cassette-type transporter is involved in antifungal terpenoid secretion. Plant Cell May 2001;13(5):1095-1107.

[1271] Jefferson, R et al. Glucuronidase from Escherichia coli as a gene-fusion marker. Proc Natl Acad Sci USA 1986;83(22):8447-8451.

[1272] Jezek, P, Costa, A D T, Vercesi, A E. 1996 Evidence for Anion-translocating Plant Uncoupling Mitochondrial Protein in Potato Mitochondria J. of Biol. Chem;271 :32743-3248.

[1273] Jezek, P, Costa, A D T, Vercesi, A E. 1997. Reconstituted Plant Uncoupling Mitochondrial Protein Allows for Proton Translocation via Fatty Acid Cycling Mechanism. J. of Biol. Chem;272:24272-24278.

[1274] Jiang, P, Zucker, P, Atkinson, M R, Kamberov, E S, Tirasophon, W, Chandran, P, Schefke, B R, Ninfa, A J. 1997 Structure/function analysis of the PII signal transduction protein of Escherichia coli: genetic separation of interactions with protein receptors. J Bacteriol;179(13):4342-4353.

[1275] Jiang, W, Hou, Y and Inouye, M. 1997 CspA, the major cold-shock protein of Escherichia coli, is an RNA chaperone. J. Biol. Chem;272:196-202.

[1276] Jiang, Y, Broach, J R. 1999 Tor proteins and protein phosphatase 2A reciprocally regulate Tap42 in controlling cell growth in yeast. EMBO J;18:2782-2792.

[1277] Jin, P, Guo, T, Becraft, P W. 2000 The maize CR4 receptor-like kinase mediates a growth factor-like differentiation response. Genesis;27:104-116.

[1278] Jinn, T L, Stone, J M, Walker, J C. 2000 HAESA, an Arabidopsis leucine-rich repeat receptor kinase, controls floral organ abscission. Genes Dev; 14:108-117.

[1279] Joazeiro, C A, Hunter, T. 2000 Biochemistry. Ubiquitination—more than two to tango. Science;289:2061-2062.

[1280] Joazeiro, C A, Weissman, A M. 2000 RING finger proteins: mediators of ubiquitin ligase activity. Cell;102:549-52.

[1281] Joersbo, M, Donaldson, Ikreiberg, J, Petersen S G, Brunstedt, J Okkels, F T. Analysis of mannose selection used for transformation of sugar beet. Molecular Breeding 1998;4(2):111-117.

[1282] Johnson, B S, Singh, N K, Cherry, J H, Locy, R D. 1997 Purification and characterization of glutamate decarboxylase from cowpea. Phytochemistry;46:39-44.

[1283] Johnston, L H, Eberly, S L, Chapman, J W, Araki, H, Sugino, A. 1990 The product of the Saccharomyces cerevisiae cell cycle gene DBF2 has homology with protein kinases and is periodically expressed in the cell cycle. Molecular and Cellular Biology;10:1358-1366.

[1284] Jonak, C, Kiegerl, S, Ligterink, W, Barker, P J, Huskisson, N S, and Hirt, H. Stress signaling in plants: a mitogen-activated protein kinase pathway is activated by cold and drought. Proc. Natl. Acad. Sci USA Oct. 1, 1996;93(20):11274-11279.

[1285] Jones, D H, Ley, S, Aitken, A. 1995 Isoforms of 14-3-3 protein can form homo- and heterodimers in vivo and in vitro: implications for function as adapter proteins. FEBS Lett;368:55-58.

[1286] Jones, H D, Smith, S J, Desikan, R, Plakidou-Dymock, S, Lovegrove, A, Hooley, R. 1998 Heterotrimeric G proteins are implicated in gibberellin induction of a-amylase gene expression in wild oat aleurone. Plant Cell;10:245-254.

[1287] Jones, R J, Roessler, J A and Ouattar, S. 1985 Thermal environment during endosperm cell division in maize: Effect on number of endosperm cells and starch granules. Crop Sc;25:830-834.

[1288] Jordan, E T, Hatfield, P M, Hondred, D, Talon, M, Zeevaart, J A, Vierstra, R D. 1995 Phytochrome A overexpression in transgenic tobacco. Correlation of dwarf phenotype with high concentrations of phytochrome in vascular tissue and attenuated gibberellin levels. Plant Physiol;107:797-805.

[1289] Josh, C P. An instpection of the domain between putative TATA box and translation start site in 79 plant genes. Nulceic Acids Res. Aug. 25, 1987;15(16):6643-6653.

[1290] Junge, W, Lill, H, Engelbrecht, S. 1997 ATP synthase: an electrochemical transducer with rotary mechanics. TIBS;22:420-423.

[1291] Kaeppler, H F, Gu, W, Somers, D A, Rines, H W, Cockburn, A F. Silicon carbide fiber-mediated DNA delivery into plant cells. Plant Cell Reports 1990;9(8):415-418.

[1292] Kagaya, Y, Ohmiya, K, Hattori, T. RAV1, a novel DNA-binding protein, binds to bipartite recognition sequence through two distinct DNA-binding domains uniquely found in higher plants. Nucleic Acids Res Jan. 15, 1999;27(2):470-478.

[1293] Kaim, G, Dimroth, P. 1999 ATP synthase by F-type ATP synthase is obligatorily dependent on the transmembrane voltage. EMBO J;18:4118-4127.

[1294] Kakimoto, T. 1996 CKI1, a histidine kinase homolog implicated in cytokinin signal transduction. Science;274:982-985.

[1295] Kaldenhoff, R, Grote, K, Zhu, J., and Zimmermann, U. 1998 Significance of plasmalemma aquaporins for water transport in Arabidopsis thaliana. Plant Journal;14:121-128.

[1296] Kaldis, P, Sutton, A, Solomon, M J. 1996 The Cdk-activating kinase (CAK) from budding yeast. Cell;86:553-564.

[1297] Kaldis, P. 1999 The cdk-activating kinase (CAK): from yeast to mammals. Cell Mol Life Sci;55:284-296.

[1298] Kampfenkel, K, Mohlmann, T, Batz, O, van Montagu, M, Inze, D, Neuhaus, H E. 1995 Molecular characterization of an Arabidopsis thaliana cDNA encoding a novel putative adenylate translocator of higher plants. FEBS Lett;374:351-355.

[1299] Kang, H G, Jang, S, Chung, J E, Cho, Y G, An, G. 1997 Characterization of two rice MADS box genes that control flowering time. Mol Cells;7:559-566.

[1300] Kang, H A and Hershey, J W. 1994 Effect of initiation factor eIF-5A depletion on protein synthesis and proliferation of Saccharomyces cerevisiae. J. Biol. Chem;269:3934-3940.

[1301] Karlsson, J, Clarke, A K, Chen, Z -Y, Hugghins, S Y, Park, Y, Husic, H D, Moroney, J V and Samuelsson, G. 1998 A novel a-type carbonic anhydrase associated with the thlakoid membrane in Chlamydomonas reinhardtii is required for growth at ambient CO2. EMBO J;17(5):1208-1216.

[1302] Kathiresan, A, Miranda, J, Chinnappa, C, Reid D. 1998 y-aminobutyric acid promotes stem elongation in Stellaria longipes: the role of ethylene. Plant Growth Regul;26:131-137.

[1303] Kathiresan, A, Tung, P, Chinnappa, C, Reid, D. 1997 y-aminobutyric acid stimulates ethylene biosynthesis in sunflower. Plant Physiol;115:129-135.

[1304] Katz, E, Thompson, C J, Hopwood, D A. Cloning and expression of the tyrosinase gene from Streptomyces antibioticus in Streptomyces lividans. J Gen Microbiol September 1983; 129(Pt9):2703-2714.

[1305] Kauschmann, A. A, Jessop, C, Koncz, M, Szekeres, L, Willmitzer, and Altmann T. 1996 Genetic evidence for an essential role of brassinosteroids in plant development. Plant J; 9:701-713.

[1306] Kawai M, Pan L, Reed J C, Uchimiya H. 1999 Evolutionally conserved plant homologue of the Bax inhibitor-1 (BI-1) gene capable of suppressing Bax-induced cell death in yeast. FEBS Lett;464: 143-147.

[1307] Kawasaki, T, Holt, B F, Nam, J, Boyes, D, Mackey, D, Taylor, C, Dangl, J 2001 RIN2 interacted with an Arabidopsis disease resistance gene, RPM1 encodes and RING finger-type ubiquitin ligase. 12^{th} International Research Conference on Arabidopsis. Abstract 200.

[1308] Kay, R et al. Duplication of Ca MV 35S promoter sequences creates a strong enhancer for plant genes. Science 1987;236:1299-1302.

[1309] Kaydamov, C, Tewes, A, Adler, K, Manteuffel, R. 2000 Molecular characterization of cDNAs encoding G protein alpha and beta subunits and study of their temporal and spatial expression patterns in Nicotiana plumbaginifolia Viv. Biochim Biophys Acta;1491:143-160.

[1310] Keeney, S, Giroux, C N, Kleckner, N. 1997 Meiosis-specific DNA double-strand breaks are catalyzed by Spo11, a member of a widely conserved protein family. Cell;88:375-384.

[1311] Kehoe, J W, Bertozzi, C R. 2000 Tyrosine sulfation: a modulator of extracellular protein-protein interactions. Chem Biol;7:R57-61.

[1312] Kemper, W M, Berry, K W, Merrick, W C. 1976 Purification and properties of rabbit reticulocyte protein synthesis initiation factors M2B□ and M2B□. J Biol Chem;251:5551-5557.

[1313] Khuri, S, Bakker, F T, Dunwell, J M. 2001 Phylogeny, function, and evolution of the cupins, a structurally conserved, functionally diverse superfamily of proteins. Mol Biol Evol;18:593-605.

[1314] Kim, K K, Hung, L W, Yokota, H, Kim, R, Kim, S H. 1998 Crystal structures of eukaryotic translation initiation factor 5A from Methanococcus jannaschii at 1.8 A resolution. Proc Natl Acad Sci USA;95:10419-10424.

[1315] Kingston-Smith, A H, Foyer, C H. 2000 Bundle sheath proteins are more sensitive to oxidative damage than those of the mesophyll in maize leaves exposed to paraquat or low temperatures. J Exp Bot;51:123-130.

[1316] Kinnersley, A M, Lin, F. 2000 Receptor modifiers indicate GABA is a potential modulator of ion transport in plants. Plant Growth Regul;32:65-76.

[1317] Kinnersley, A M. 1998 Bioactivity of AuxiGro Plant Metabolic Primer, a formulation containing GABA and glutamic acid. In: Proc. 25^{th} Ann. Mtg. Plant Growth Regulation Soc. Of America, pp. 89-94.

[1318] Kinoshita, Y, Jarell, A D, Flaman, J M, Foltz, G, Schuster, J, Sopher, B L, Irvin, D K, Kanning, K, Komblum, H I, Nelson, P S, Hieter, P, Morrison, R S. 2001 Pescadillo, a novel cell cycle regulatory protein abnormally expressed in malignant cells. J Biol Chem; 276(9):6656-6665.

[1319] Kinoshita, T, Yadegari, R, Harada, J J, Goldberg, R B, Fische, R L. 1999 Imprinting of the MEDEA polycomb gene in the Arabidopsis endosperm. Plant Cell;11: 1945-1952.

[1320] Kirsch, C et al 2001 A highly specific pathogen-responsive promoter element from the immediate-early avtivated CMPG1 gene in Petroselinum crispum. The Plant Journal;26(2):217-227.

[1321] Kisselbach, T A. 1949 The Structure and Reproduction of Corn. reprinted by Cold Spring Harbor Laboratory Press 1999.

[1322] Kiyosue, T, Wada, M. 2000 LKP1 (LOV kelch protein 1): a factor involved in the regulation of flowering time in arabidopsis. Plant J;23:807-815.

[1323] Kiyosue, T, Abe, H, Yamaguchi-Shinozaki, K, Shinozaki, K. 1998 ERD6, a cDNA clone for an early dehydration-induced gene of Arabidopsis, encodes a putative sugar transporter. Biochim. Biophys. Acta;1370:187-191.

[1324] Kiyosue, T, Ohad, N, Yadegari, R, Hannon, M, Dinneny, J, Wells, D, Katz, A, Margossian, L, Harada, J J, Goldberg, R B, and Fischer, R L. 1999 Control of fertilization-independent endosperm development by the MEDEA polycomb gene in Arabidopsis. Proc. Natl. Acad. Sci. USA;96:4186-4191.

[1325] Kiyosue, T, Yamaguchi-Shinozaki, K, Shinozaki, K. 1994 Characterization of two cDNAs (ERD10 and ERD14) corresponding to genes that respond rapidly to dehydration stress in Arabidopsis thaliana. Plant Cell Physiol;35:225-231.

[1326] Klahre, U T, Noguchi, S, Fujioka, S, Takatsuto, T, Yokota, T, Nomura, S, Yoshida, and Chuan, NH. 1998 The Arabidopsis DIMINUTO/DWARF1 gene encodes a protein involved in steroid synthesis. Plant Cell; 10:1677-1690.

[1327] Klee, H, Horsch, R, Rogers, S. Agrobacterium-mediated plant transformation and its further applications to plant biology. Annu. Rev. Plant Physiol. Plant Mol Biol. 1987;38:467-486.

[1328] Klein, R G, Beeson, W M, Cline, T R, Mertz, E T. 1971 Opaque-2 and floury-2 corn studies with growing swine. J Anim Sci;32(2):256-261.

[1329] Klessig, D F, Durner, J, Noad, R, Navarre, D A, Wendehenne, D, Kumar, D, Zhou, J M, Shah, J, Zhang, S, Kachroo, P, Trifa, Y, Pontier, D, Lam, E, Silva, H. 2000 Nitric oxide and salicylic acid signaling in plant defense. Proc Natl Acad Sci USA;97:8849-8855.

[1330] Kliebenstein, D J, Monde, R A, Last, R L. 1998 Superoxide dismutase in Arabidopsis: an eclectic enzyme family with disparate regulation and protein localization. Plant Physiol;118:637-650.

[1331] Klimczak, L J, Collinge, M A, Farini, D, Giuliano, G, Wlaker, J C and Cashmore, A R. 1995 Reconstitution of Arabidopsis Casein Kinase II from recombinant subunits and phosphorylation of transcription factor GBF1. Plant Cell;7(1):105-115.

[1332] Klimczak, L J, Schindler, U and Cashmore, A R. 1992 Reconstitution of Arabidopsis casein kinase II from recombinant subunits and phosphorylation of transcription factor GBF1. Plant Cell;4(1): 87-98.

[1333] Knauer, R, Lehle, L. 1999 The oligosaccharyltransferase complex from Saccharomyces cerevisiae. Isolation of the OST6 gene, its synthetic interaction with OST3, and analysis of the native complex. J Biol Chem;274:17249-17256.

[1334] Kodaki, T, Yamashita, S. Yeast phosphatidylethanolamine methylation pathway. Cloning and characterization of two distinct methyltransferase genes. J Biol Chem 1987;262:15428-15435.

[1335] Kodama, H. Fatty acid desaturation during chilling acclimation is one of the factors involved in conferring low-temperature tolerance to young tobacco leaves. Plant Physiology April 1995; 107(4):1177-1185.

[1336] Kodama, O, Miyakawa, J, Akatsuka, T, Kiyosawa, S. 1992 Sakuranetin, a flavonone phytoalexin from ultraviolet-irradiated rice leaves. Phytochem;31:3807-3808.

[1337] Kohler, C, Merkle, T, Roby, D, Neuhaus, G. 2001 Developmentally regulated expression of a cyclic nucleotide-gated ion channel from Arabidopsis indicates its involvement in programmed cell death. Planta;213:327-332.

[1338] Koizumi, N, Martinez, I M, Kimata, Y, Kohno, K, Sano, H, Chrispeels, M J. 2001 Molecular characterization of two Arabidopsis ire1 homologs, endoplasmic reticulum-located transmembrane protein kinases. Plant Physiol;127:949-962.

[1339] Komori, K, Sakae, S, Shinagawa, H, Morikawa, K, Ishino, Y. 1998 A Holliday junction resolvase from Pyrococcus furiosus: functional similarity to Escherichia coli RuvC provides evidence for conserved mechanism of homologous recombination in Bacteria, Eukarya, and Archaea. Proc Natl Acad Sci USA;96:8873-8878.

[1340] Koornnef, Maarten, Leon-Kloosterziel, Karen M, Schwartz, Steven H, Zeevaart, Jan A D. The genetic and molecular dissection of abscisic acid biosynthesis and signal transduction in Arabidopsis. Plant Physiol. Biochem;36:83-89, 1998.

[1341] Koyama, H, Kawamura, A, Kihara, T, Hara, T, Takita, E, Shibata, D. 2000 Overexpression of mitochondrial citrate synthase in Arabidopsis thaliana improved growth on a phosphorus-limited soil. Plant Cell Physiol;41:1030-1037.

[1342] Kramer, P J, Boyer, J S.1995 Water relations of plants and soil. Academic Press.

[1343] Kubigsteltig, I, Laudert, D, Weiber, E W. 1999 Structure and regulation of the Arabidopsis thaliana allene oxide synthase gene. Planta;208:463-471.

[1344] Kuhlbrandt, W, Wang, D N, Fujiyoshi, Y. Atomic model of plant light-harvesting complex by electron crystallography. Nature Feb. 17, 1994;367(6464):614-621.

[1345] Kuihn, C, Franceschi, V R, Schulz, A, Lemoine, R, and Frommer, W B. 1997 Localization and turnover of sucrose transporters in enucleate sieve elements indicate macromolecular trafficking. Science;275:1298-1300.

[1346] Kumar, A M, Soll, D. 1992 Arabidopsis alternative oxidase sustains Escherichia coli respiration. Proc. Natl. Acad. Sci. USA;89:10842-10846.

[1347] Kunz, J, Loeschmann, A, Deuter-Reinhard, M, Hall, M N. 2000 FAP1, a homologue of human transcription factor NF-X1, competes with rapamycin for binding to FKBP12 in yeast. Mol Microbiol. September 2000;37(6):1480-1493.

[1348] Kusaba, M, Dwyer, K, Hendershot, J, Vrebalov, J, Nasrallah, J B, Nasrallah, M E. 2001 Self-Incompatibility in the Genus Arabidopsis. Characterization of the s locus in the outcrossing a. lyrata and its autogamous relative a. thaliana. Plant Cell;13:627-643.

[1349] Kusao, T., Berberich, T., Harada, M., Suzuki, N., Sugawara, K. 1995 A maize DNA-binding factor with bZIP motif is induced by low temperature. Mol. Gen. Genet;248:507-517.

[1350] Kusnetsov, V, Herrmann, R G, Kulaeva, O N, Oelmuller, R. 1998 Cytokinin stimulates and abscisic acid inhibits greening of etiolated Lupinus luteus cotyledons by affecting the expression of the light-sensitive protochlorophyllide oxidoreductase. Mol Gen Genet;259:21-28.

[1351] Kyozuka, J, Konishi, S, Nemoto, K, Izawa, T, Shimamoto, K. 1998 Down-regulation of RFL, the FLO/LFY homolog of rice, accompanied with panicle branch initiation. Proc Natl Acad Sci USA;95:1979-1982.

[1352] Kyrpides, N C, Woese, C R. 1998 Universally conserved translation initiation factors. Proc Natl Acad Sci USA;95:224-228.

[1353] Kyte, J and Doolittle, R F. 1982 A simple method for displaying the hydropathic character of a protein. J. Mol. Biol;157(6):105-142.

[1354] Lahiri, S D, Yao, J, McCumbers, C, Allison, L A. 1999 Tissue-specific and light-dependent expression within a family of nuclear-encoded sigma-like factors from Zea mays. Mol Cell Biol Res Commun;1(1):14-20.

[1355] Lai, M H, Bard, M, Pierson, C A, Alexander, J F, Goebl, M, Carter, G T, and Kirsch, D. 1994 The identification of a gene family in the Saccharomyces cerevisiae ergosterol biosynthesis pathway. Gene;140: 41-49.

[1356] Laloi, M, Klein, M, Riesmeir, J W, Muller-Rober, B, Fluery, C Bouillaud, F, Ricquier, D. 1997. A plant cold-induced uncoupling protein. Nature;389:135-136.

[1357] Lam, E, Kato, N, Lawton, M. 2001 Programmed cell death, mitochondria and the plant hypersensitive response. Nature;411:848-853.

[1358] Lam, H M, Chiu, J, Hsieh, M H, Meisel, L, Oliveiria, I C, Shin, M, Corruzzi, G. 1998 Glutamate receptor genes in plants. Nature;396:125-126.

[1359] Laudert, D, Pfannschmidt, U, Lottspeich, F, Hollander-Czytka, H, and Weiler, E W. 1996 Cloning, molecular and functional characterization of Arabidopsis thaliana allene oxide synthase (CYP 74), the first enzyme of the octadecanoid pathway to jasmonates. Plant Mol. Biol;31:323-335.

[1360] Laudert, D, Schaller, F, Weiler, E. 2000 Transgenic Nicotiana tabacum and Arabidopsi thaliana plants overexpressing allene oxide synthase. Planta;211:163-165.

[1361] Laufs, J, Wirtz, U, Kammann, M, Matzeit, V, Schaefer, S, Schell, J, Czemilofsky, A P, Baker, B, Gronenborn, B. Wheat dwarf virus Ac/Ds vectors: expression and excision of transposable elements introduced into various cereals by a viral replicon. Proc Natl Acad Sci USA October 1990; 87(19):7752-7756.

[1362] Lee, I, Wolfe, D S, Nilsson, O, Weigel, D. 1997 A LEAFY co-regulator encoded by UNUSUAL FLORAL ORGANS. Curr Biol;7:95-104.

[1363] Lee, I J, Foster, K R, Morgan, P W. 1998 Photoperiod control of gibberellin levels and flowering in sorghum. Plant Physiol;116:1003-1011.

[1364] Lee, J H, Hubel, A, Schoffl, F. 1995 Derepression of the activity of genetically engineered heat shock factor causes constitutive synthesis of heat shock proteins and increased thermotolerance in transgenic Arabidopsis. Plant J;8:603-612.

[1365] Lee, J H, Van Montagu, M, Verbruggen, N. A highly conserved kinase is an essential component for stress tolerance in yeast and plant cells. Proc Natl Acad Sci USA May 1, 1999;96(10):5873-5877.

[1366] Lee, K O, Jang, H H, Jung, B G, Chi, Y H, Lee, J Y, Choi, Y O, Lee, J R, Lim, C O, Cho, M J, Lee, S Y. 2000 Rice 1Cys-peroxiredoxin over-expressed in transgenic tobacco does not maintain dormancy but enhances antioxidant activity. FEBS Lett;486:103-106.

[1367] Lee, R H, Wang, C H, Huang, L T, Chen, S C. 2001 Leaf senescence in rice plants: cloning and characterization of senescence up-regulated genes. J Exp Bot;52:1117-1121.

[1368] Lee, S., Suh, S., Seju, K., Crain, R. C., Kwak, J. M., Nam, H. G., and Lee, Y. 1997 Systemic elevation of phosphatidic acid and lysophospholipid levels in wounded plants. Plant J;12:547-556.

[1369] Lee, T M, Lur, H S, Lin, Y H, Chu, C. 1996 Physiological and biochemical changes related to methyl jasmonate-induced chilling tolerance of rice Oryza sativa L. Plant Cell Envir;19:65-74.

[1370] Lee, Y, Lloyd, A M and Roux, S J. 1999 Antisense expression of the CK2 σ-subunit gene in Arabidopsis. Effects on light-regulated gene expression and plant growth. Plant Physiology;119:989-1000.

[1371] Lee, Y R, Assmann, S M. 1999 Arabidopsis thaliana ‘extra-large GTP-binding protein’ (AtXLG1): a new class of G-protein. Plant Mol Biol 40:55-64.

[1372] Lees, N D, Bard, M, and Kirsch, D R. 1999 Biochemistry and molecular biology of sterol synthesis in Saccharomyces cerevisiae. Crit. Rev. Biochem. Mol. Biol;34:33-47.

[1373] Legendre, L 1993 Phospholipase activity and phospholipid patterns in tobacco cells treated with fungal elicitor. Plant Sci;107: 17-25.

[1374] Leggewie, G, Wilmitze, R L, Riesmeier, J W. 1997 Two cDNAs from potato are able to complement a phosphate uptake-deficient yeast mutant: identification of phosphate transporters from higher plants. Plant Cell;9:381-392.

[1375] Lemoine, R, Kühn, C, Thiele, N, Delrot, S, Frommer, WB. 1996 Antisense inhibition of the sucrose transporter: Effects on amount of carrier and sucrose transport activity. Plant Cell Environ; 19:1124-1131.

[1376] Leshem, Y Y, Pinchasov, Y. 2000 Non-invasive photoacoustic spectroscopic determination of relative endogenous nitric oxide and ethylene content stoichiometry during the ripening of strawberries Fragaria anannasa (Duch.) and avocados Persea americana (Mill.). J Exp Bot;51:1471-1473.

[1377] Leung, J, and Giraudat, J. 1998 Abscisic acid signal transduction. Annu. Rev. Plant Physiol. Plant Mol. Biol;49:199-222.

[1378] Leustek, T, Smith, M, Murillo, M, Singh, D P, Smith, A G, Woodcock, S C, Awan, S J, Warren, M J. 1997 Siroheme biosynthesis in higher plants. Analysis of an S-adenosyl-L-methionine-dependent uroporphyrinogen III methyltransferase from Arabidopsis thaliana. J Biol Chem;272:2744-2752.

[1379] Li, B D, Liu, L, Dawson, M, De Benedetti, A. 1997 Overexpression of eukaryotic initiation factor 4E (eIF4E) in breast carcinoma. Cancer;79:2385-2390.

[1380] Li, Q, Ritzel, R G, McLean, L L T, McIntosh, L, Ko, T, et al. 1996 Cloning and analysis of the alternative oxidase gene of Neurospora crassa. Genetics;142:129-140.

[1381] Li, W, Assmann, S M. 1993 Characterization of a G-protein-regulated outward K+ current in mesophyll cells of vicia faba L. Proc Natl Acad Sci USA;90:262-266.

[1382] Li, Z, Wurtzel, E T. 1998 The Itk gene family encodes novel receptor-like kinases with temporal expression in developing maize endosperm. Plant Mol Biol;37:749-761.

[1383] Liang, F, Cunningham, K. W, Harper, J F, and Sze, H. 1997 ECA1 complements yeast mutants defective in Ca pumps and encodes an ER-type Ca-ATPase in Arabidopsis thaliana. Proc. Natl. Acad. Sci. USA;94:8579-8584.

[1384] Lill, N L, Douillard, P, Awwad, R A, Ota, S, Lupher, M L Jr, Miyake, S, Meissner-Lula, N, Hsu, V W, Band, H. 2000 The evolutionarily conserved N-terminal region of Cbl is sufficient to enhance down-regulation of the epidermal growth factor receptor. J Biol Chem;275:367-377.

[1385] Lin, C M, Koh, S, Stacey, G, Yu, S M, Lin, T Y, Tsay, Y F. 2000 Cloning and functional characterization of a constitutively expressed nitrate transporter gene, OsNRT1, from rice. Plant Physiol. 2000;122:379-388.

[1386] Lincoln, C, Long, J, Yamaguchi, J, Serikawa, K, Hake, S. 1994 A knottedl-like homeobox gene in Arabidopsis is expressed in the vegetative meristem and dramatically alters leaf morphology when overexpressed in transgenic plants. Plant Cell;6: 1859-1876.

[1387] Ling, V, Snedden, W A, Shelp, B J, Assmann, S A. 1994 Analysis of a soluble calmodulin binding protein from fava bean roots: identification of glutamate decarboxylase as a calmodulin-activated enzyme. Plant Cell;6:1135-1143.

[1388] Lipowsky, G, Bischoff, F R, Schwarzmaier, P, Kraft, R, Kostka, S, Hartmann, E, Kutay, U, Gorlich, D. 2000 Exportin 4: a mediator of a novel nuclear export pathway in higher eukaryotes. EMBO J;19:4362-4371.

[1389] Liscovitch, M., and Cantley, L C. 1994 Lipid second messengers. Cell;77:329-334

[1390] Liscovitch, M., and Cantley, L C. 1995 Signal transduction and membrane traffic: The PITP/phosphoinositide connection. Cell;81:659-662.

[1391] Lisitsky I, and Schuster G. 1995 Phosphorylation of a chloroplast RNA-binding protein changes its affinity to RNA. Nucleic Acids Res. 23:2506-11

[1392] Lisse, T, Bartels, D, Kalbitzer, H R, Jaenicke, R. 1996 The recombinant dehydrin-like desiccation stress protein from the resurrection plant Craterostigma plantagineum displays no defined three-dimensional structure in its native state. Biol Chem; 1996 377:555-561.

[1393] Liu, D, Bienkowska, J, Petosa, C, Collier, R J, Fu, H, Liddington, R. 1995 Crystal structure of the zeta isoform of the 14-3-3 protein. Natur;376:191-194.

[1394] Liu, C., Muchhal, U S, Uthappa, M, Kononowicz, A K, Raghothama, K G. 1998 Tomato Phosphate Transporter Genes Are Differentially Regulated in Plant Tissues by Phosphorus. Plant Physiol;116:91-99.

[1395] Liu, K H, Huang, C Y, Tsay, Y F. CHL1 is a dual-affinity nitrate transporter of Arabidopsis involved in multiple phases of nitrate uptake. Plant Cell May 1999;11(5):865-874.

[1396] Liu, L, Tewari, R P, and Williamson, P R 1999 Laccase protects Cryptococcu neoformans from antifungal activity of alveolar macrophages. Infection and Immunity;67:6034-6039.

[1397] Liu, L, Zeng, M, Hausladen, A, Heitman, J, Stamler, J S. 2000 Protection from nitrosative stress by yeast flavohemoglobin. Proc Nati Acad Sci USA;97:4672-4676.

[1398] Liu Q, and Dreyfuss G. 1995 In vivo and in vitro arginine methylation of RNA-binding proteins. Mol Cell Biol. 15:2800-8.

[1399] Liu, Y P, Nemeroff, M, Yan, Y P and Chen, K Y. 1997 Interaction of eukaryotic initiation factor 5A with the human immunodeficiency virus type 1 Rev response element RNA and U6 snRNA requires deoxyhypusine or hypusine modification. Biol. Signals; 6:166-174.

[1400] Lloyd, A M, Walbot, V and Davis, R W. 1992 Arabidopsis and Nicotiana anthocyanin production activated by maize regulators R and C1. Science;258:1773-1775.

[1401] Lo, Samuel C, Yoki K C Butt, Chan, Y S Gilbert. 2000 False nitric oxide synthase immunoreactivity in Asparagus bean. Nitric Oxide;4: 175.

[1402] Loggini, B, Scartazza, A, Brugnoli, E, Navari-Izzo, F. 1999 Antioxidative defense system, pigment composition, and photosynthetic efficiency in two wheat cultivars subjected to drought. Plant Physiol;119:1091-1100.

[1403] Lopez-Bucio, J, de La Vega, O M, Guevara-Garcia, A, Herrera-Estrella, L. 2000 Enhanced phosphorus uptake in transgenic tobacco plants that overproduce citrate. Nat Biotechnol;1 8:450-453.

[1404] Lorbiecke, R, Sauter, M. 1999 Adventitious root growth and cell-cycle induction in deepwater rice. Plant Physiol;119:21-30.

[1405] Lorenz, T R. and Parks, L W. 1992 Cloning, sequencing, and disruption of the gene encoding sterol C-14 reductase in Saccharomyces cerevisiae. DNA Cell Biol;11:685-692.

[1406] Lorick, K L, Jensen, J P, Fang, S, Ong, A M, Hatakeyama, S, Weissman, A M. 1999 RING fingers mediate ubiquitin-conjugating enzyme (E2)-dependent ubiquitination. Proc Natl Acad Sci USA; 96:11364-11369.

[1407] Low, P S, Merida, J R. 1996 The oxidative burst in plant defense: function and signal transduction. Physiol. Plant;10:533-542.

[1408] Lu, Y P, Zhen, R G, Rea, P A. 1997 AtPT4: A fourth member of the Arabidopsis phosphate transporter gene family (accession no.U97546). Plant Physiol;114:747-757.

[1409] Ludwig, S R, Bowen, B, Beach, L, Wessler, S. 1990 A regulatory gene as a novel visible marker for maize transformation. Science;247:449-450.

[1410] Ludwig-Muller, J, Krishna, P, Forreiter, C. A glucosinolate mutant of Arabidopsis is thermosensitive and defective in cytosolic Hsp90 expression after heat stress. Plant Physiol July 2000; 123(3):949-958.

[1411] Luo, M, Bilodeau, P, Koltunow, A, Dennis, E. S, Peacock, W J, and Chaudhury, A M. 1999 Genes controlling fertilization-independent seed development in Arabidopsis thaliana. Proc. Natl. Acad. Sci. USA;96:296-301.

[1412] Lyznik, L A, Rao, K V, Hodges, T K. FLP-mediated recombination of FRT sites in the maize genome. Nucleic Acids Res. Oct. 1, 1996;24(19):3784-3789.

[1413] Ma, H, Yanofsky, M F, Meyerowitz, E M. 1990 Molecular cloning and characterization of GPA1, a G protein alpha subunit gene from Arabidopsis thaliana. Proc Natl Acad Sci USA;87:3821-3825.

[1414] Ma, J, Przibilla, E, Hu, J, Bogorad, L, Ptashne, M. Yeast activators stimulate plant gene expression. Nature Aug. 18, 1988;334(6183):631-633.

[1415] Maia, I G, Benedetti, C E, Leite, A, Turcinelli, S R, Vercesi, A E, Arruda, P. 1998 AtPUMP: an Arabidopsis gene encoding a plant uncoupling mitochondrial protein. FEBS Lett;429:403-406.

[1416] Makishima, T, Yoshimi, M, Komiyama, S, Hara, N, Nishimoto, T. 2000 A subunit of the mammalian oligosaccharyltransferase, DAD1, interacts with Mc1-1, one of the bc1-2 protein family. J Biochem (Tokyo);128:399-405.

[1417] Malik, M K, Slovin, J P, Hwang, C H, Zimmerman, J L. 1999 Modified expression of a carrot small heat shock protein gene, hsp17. 7, results in increased or decreased thermotolerance. Plant J;20:89-99.

[1418] Mandava, N. 1988 Plant growth-promoting brassinosteroids. Annu. Rev. Plant Physiol. Plant Mol. Biol;39:23-52.

[1419] Maniatis, Sambrook. Molecular Cloning: A Laboratory Manual, Cold Spring Harbor Press, 1989. Manival, X, Ghisolfi-Nieto, L, Joseph, G, Bouvet, P and Erard, M, RNA-binding strategies common to cold-shock domain- and RNA recognition motif-containing proteins. NAR 2001,29(11):2223-2233.

[1420] Mano, J, Babiychuk, E, Belles-Boix, E, Hiratake, J, Kimura, A, Inze, D, Kushnir, S, Asada, K. 2000 A novel NADPH:diamide oxidoreductase activity in Arabidopsis thaliana P1 zeta-crystallin. Eur J Biochem;267:3661-3671.

[1421] Marcireau, Guyonnet, D, and Karst, F. 1992 Construction and growth properties of a yeast strain defective in sterol 14-reductase. Curr. Genet.;22:267-272.

[1422] Marcus, A I, Moore, R C, Cyr, R J. 2001 The Role of Microtubules in Guard Cell Function. Plant Physiol;125:387-395.

[1423] Marechal, V, Elenbaas, B, Piette, J, Nicolas, J C, Levine, A J. 1994 The ribosomal L5 protein is associated with mdm-2 and mdm-2-p53 complexes. Mol Cell Biol;114:7414-7420.

[1424] Markham, K R, Tanner, G J, Cassi-Lit, M, Whitecross, M I, Naidu, M, Mitchell, K A. 1998 Protectant 3′,4′-dihydroxy flavones induced by enhanced UV-B in UV-tolerant rice cultivar. Phytochem;4 (6):2208-2212.

[1425] Marrs, K A, Casey, E S, Capitant, S A, Bouchard, R A, Dietrich, P S, Mettler, I J, Sinibaldi, R M. 1993 Characterization of two maize HSP90 heat shock protein genes: expression during heat shock, embryogenesis, and pollen development. Dev Genet;14:27-41.

[1426] Marshall, J G and Dumbroff, E B. Turgor regulation via cell wall adjustment in white spruce. Plant Physiol. January 1999;119(1):313-320.

[1427] Martin, C, Prescott, A, Mackay, S, Barlett, J, Vrijlandt, E. (1991) Control of anthocyanin biosynthesis in flowers of Antirrhinum majus. Plant J;1:37-49.

[1428] Martin, D, Proebsting, W, Hedden, P. The SLENDER gene of pea encodes a gibberellin 2-oxidase. Plant Physiology November 1999;121(3):775-781.

[1429] Martin, R C, Mok, M C, Mok D W S. 1999b Isolation of a cytokinin gene, ZOG1, encoding zeatin O-glucosyltransferase from Phaseolus lunatus. Proc. Natl. Acad. Sci. U.S.A;96:284-289.

[1430] Martin, R C, Mok, M C, Mok, D W S. 1999a A gene encoding the cytokinin enzyme zeatin O-xyosyltransferase of Phaseolus vulgaris. Plant Physiol;120:553-557.

[1431] Martin, W, Mustafa A Z, Henze, K, Schnarrenberger, C. Higher-plant chloroplast and cytosolic fructose-1,6-bisphosphatase isoenzymes: origins via duplication rather than prokaryote-eukaryote divergence. Plant Mol Biol November 1996;32(3):485-491.

[1432] Martinez-Garcia, J F, Huq, E, Quail, P H. 2000 Direct targeting of light signals to a promoter element-bound transcription factor. Science;288:859-863.

[1433] Martinez-Garcia, J F, Quail, P H. 1999 The HMG-I/Y protein PF1 stimulates binding of the transcriptional activator GT-2 to the PHYA gene promoter. Plant J;18:173-183.

[1434] Marty, I, Brugidou, C, Chartier, Y, Meyer, Y. 1993 Growth-related gene expression in Nicotiana tabacum mesophyll protoplasts. Plant J. August 1993;4(2):265-278.

[1435] Mason, M G, Botella, J R. 2000 Completing the heterotrimer: isolation and characterization of an arabidopsis thaliana G protein gamma-subunit cDNA. Proc Natl Acad Sci USA;97: 14784-14788.

[1436] Massacci, A, Battistelli, A, Loreto, F. 1996 Effect of drought stress on photosynthetic characteristics, growth and sugar accumulation of field-grown sweet sorghum. Aust J Plant Physiol;23:331-340.

[1437] Massacci, A, Jannelli, M A, Pietrini, F, Loreto, F. 1995 The effect of growth at low temperature on photosynthetic characteristics and mechanisms of photoprotection of maize leaves. J Exp Bot;46:119-127.

[1438] Matsubayashi, Y, Sakagami, Y. 1999 Characterization of specific binding sites for a mitogenic sulfated peptide, phytosulfokine-alpha, in the plasma-membrane fraction derived from Oryza sativa L. Eur J Biochem;262:666-671.

[1439] Matsubayashi, Y, Sakagami, Y. 2000 120- and 160-kDa receptors for endogenous mitogenic peptide, phytosulfokine-alpha, in rice plasma membranes. J Biol Chem;275:15520-15525.

[1440] Matsubayash,i Y, Takagi, L, Sakagami, Y. 1997 Phytosulfokine-alpha, a sulfated pentapeptide, stimulates the proliferation of rice cells by means of specific high- and low-affinity binding sites. Proc Natl Acad Sci USA.;94:13357-13362.

[1441] Matsufuji, S, Miyazaki, Y, Kanamoto, R, Kameji, T, Murakami, Y, Baby, T G, Fujita, K, Ohno, T, Hayashi, S. 1990 Analyses of ornithine decarboxylase antizyme mRNA with a cDNA cloned from rat liver. J Biochem (Tokyo);108:365-371.

[1442] Matsukura, C, Saitoh, T, Hirose, T, Ohsugi, R, Perata, P, Yamaguchi, J. 2000 Sugar Uptake and Transport in Rice Embryo. Expression of Companion Cell-Specific Sucrose Transporter (OsSUT1) induced by Sugar and Light. Plant Phys;124:85-93.

[1443] Matsumoto, Y, Sarkar, G, Sommer, S S, Wickner, R B. 1993 A yeast antiviral protein, SK18, shares a repeated amino acid sequence pattern with beta-subunits of G proteins and several other proteins. Yeast;9:43-51.

[1444] Mattoon, J R, Caravajal, E and Guthrie, D. 1990 Effects of hap mutations on heme and cytochrome formation in yeast. Curr. Genet;17:179-183.

[1445] Maural, C, Reizer, J, Schroeder, J L, and Chrispeels, M J. 1993 The vacuolar membrane protein γ-TIP creates specific channels in Xenopus oocytes. EMBO;12:2241-2247.

[1446] Maxwelll, D P, Wang, Y, McIntosh, L. The alternative oxidase lowers mitochondrial reactive oxygen production in plant cells. 1999. Proc. Nat Acad Sc;96:8271-8276.

[1447] May, T, Soll, J. 2000 14-3-3 proteins form a guidance complex with chloroplast precursor proteins in plants. Plant Cell;12:53-64.

[1448] Mayer, R R, Cherry, J H, Rhodes, D. 1990 Effects of heat shock on amino acid metabolism of cowpea cells. Plant Physiol;94:796-810.

[1449] Mazin, A V, Zaitseva, E, Sung, P, Kowalczykowski, S C. 2000 Tailed duplex DNA is the preferred substrate for Rad51 protein-mediated homologous pairing. EMBO J;19:1148-1156.

[1450] McBride A E, Weiss V H, Kim H K, Hogle J M, Silver P A. 2000 Analysis of the yeast arginine methyltransferase Hmt1p/Rmt1p and its in vivo function. J Biol Chem. 275:3128-36.

[1451] McCabe, T C, Finnegan, P M, Millar, A H, Day, D A, Whelan, J. 1998 Differential expression of the alternative oxidase genes in soybean cotyledons during postgerminative development. Plant Physiol;118:675-682.

[1452] McCracken, A A, Brodsky, J L. 2000 A molecular portrait of the response to unfolded proteins. Genome Biol.1(2):REVIEWS1013.

[1453] McGaw 1987 Cytokinin biosynthesis and metabolism. Plant hormones and their role in plant growth and development. Davies, P J ed. 76-93.

[1454] McGee 199) Maize Diseases: A reference source for seed technologists. The American Phytopathological Society, St. Paul, Minn.

[1455] McIntosh, L, Eichler, T, Gray, G, Maxwell, D, Nickels, R, Wang, Y. 1998 Biochemical and genetic controls exerted by plant mitochondria. Biochim Biophys. Acta;1365:278-284.

[1456] McIhtosh, L. 1994 Molecular biology of the alternative oxidase. Plant Physiol, 105:781-786.

[1457] McKenzie, M J, Mett, V, Reynolds, P H S, Jameson, P E. 1998 Controlled cytokinin production in transgenic tobacco using a copper-inducible promoter. Plant Physiol;116:969-977.

[1458] McKersie, B D, Bowley, S R, Jones, K S. 1999 Winter survival of transgenic alfalfa overexpressing superoxide dismutase. Plant Physiol; 119:839-848.

[1459] McKersie, B D, Bowley, S R. 1997 Active oxygen and freezing tolerance in transgenic plants. Plant Cold Hardiness: New York: Plenum: 68:203-204.

[1460] McKersie, B D, Murnaghan, J, Jones, K S, Bowley, S R. 2000 Iron-superoxide dismutase expression in transgenic alfalfa increases winter survival without a detectable increase in photosynthetic oxidative stress tolerance. Plant Physiol;122:1427-1437.

[1461] McMullen, M D, Byrne, P F, Snook, M E, Wiseman, B R, Lee, E A, Widstrom, N. W. 1998 Quantitative trait loci and metabolic pathways. Proc. Natl. Acad. Sci;95:1996-2000.

[1462] McNeil, S, Rhodes, D, Russell, B, Nuccio, M, Sachar-Hill, Y, and Hanson, A. Metabolic Modeling identifies the key constraints on an engineered glycine betaine syntheis pathway in tobacco. Plant Physiology 2000;124:153-162.

[1463] McNeil, S D., Nuccio, M L, and Hanson, A D. Betaines and related osmoprotectants. Targets for metabolic engineering of stress resistance. Plant Physiol. (August 1999),120:945-949.

[1464] McNeil, S D, Nuccio M L, Ziemak M J, Hanson A D. Enhanced synthesis of choline and glycine betaine in transgenic tobacco plants that overexpress phosphoethanolamine N-methyltransferase. Proc Natl Acad Sci USA 2001;98:10001-10005.

[1465] McWhorter, C G Epicuticular wax on Johnsongrass (Sorghum halepense) leaves. Weed Science 1997;41:475-482.

[1466] Meacham, G C, Patterson, C, Zhang, W, Younger, J M, Cyr, D M. 2001 The Hsc70 co-chaperone CHIP targets immature CFTR for proteasomal degradation. Nat Cell Biol;3: 100-5.

[1467] Meijer, H. J. G., Divecha, N., van der Ende, H., Musgrave, A., Munnik, T. 1999 Hyperosmotic stress induces rapid synthesis of phosphatidyl-d-inositol 3,5-bisphosphate in plant cells. Planta;208:294-298.

[1468] Melis, A. 1991. Dynamics of photosynthetic membrane composition and function. Biochim. Biophys. Acta;1058:87-106.

[1469] Membrillo-Hernandez, J, Coopamah, M D, Anjum, M F, Stevanin, T M, Kelly A, Hughes, M N, Poole, R K. 1999 The flavohemoglobin of Escherichia coli confers resistance to a nitrosating agent, a “Nitric oxide Releaser,” and paraquat and is essential for transcriptional responses to oxidative stress. J Biol Chem;274:748-754.

[1470] Merkouropoulos, G, Barnett, D, Shirsat, A. 1999 The Arabidopsis extensin gene is developmentally regulated, is induced by wounding, methyl jasmonate, abscisic and salicylic acid, and codes for a protein with unusual motifs. Planta;208:212-219.

[1471] Mezitt, L A, Lucas, W J. 1996 Plasmodesmal cell-to-cell transport of proteins and nucleic acids. Plant Mol. Biol;32:251-273.

[1472] Michaels, S D, Amasino, R M. 1999 Flowering Locus C encodes a novel MADS domain protein that acts as a repressor of flowering. Plant Cell;11:763-764.

[1473] Michelet, B, and Boutry, M. 1995 The plasma membrane ATPase: A highly regulated enzyme with multiple physiological functions. Plant Physiol;108:1-6.

[1474] Mikami, K, Katagiri, T, Iuchi, S, Yamaguchi-Shinozaki, K, and Shinozaki, K. 1998 A gene encoding phosphatidylinositol-4-phosphate 5-kinase is induced by water stress and abscisic acid in Arabidopsis thaliana. Plant J;15:563-568.

[1475] Millar, A A, Clemens, S, Zachgo, S, Giblin, E M, Taylor, D C, Kunst, L. CUT1, an Arabidopsis gene required for cuticular wax biosynthesis and pollen fertility, encodes a very-long-chain fatty acid condensing enzyme. Plant Cell May 1999;11(5):825-38.PMID: 10330468; UI: 99264304.

[1476] Millar, A A, Wrischer, M, Kunst, L. Accumulation of very-long-chain fatty acids in membrane glycerolipids is associated with dramatic alterations in plant morphology. Plant Cell November 1998; 10(11):1889-18902.

[1477] Miranda, E J, Hazel, J R. 1996 Temperature-induced changes in the transbilayer distribution of phosphatidylethanol-amine in mitoplasts of rainbow trout (Oncorthynchus mykiss) liver. J. Exp. Zool;274:23-32.

[1478] Miranda, L. T. de. 1984 Genetics of environmental resistance and super-genes: latente heat tolerance. Maize genetics cooperation news letter. 58.

[1479] Mitchell, P, Tollervey, D. 2000 Musing on the structural organization of the exosome complex. Nat Struct Biol;7:843-846.

[1480] Mitsuhara, I, Malik, K A, Miura, M, Ohashi, Y. 1999 Animal cell-death suppressors Bcl-x(L) and Ced-9 inhibit cell death in tobacco plants. Curr Biol;9:775-778.

[1481] Mitsukawa, N, Okumura, S, Shirano, Y, Sato, S, Kato, T, Harashima, S, Shibata, D. 1997 Overexpression of an Arabidopsis thaliana high-affinity phosphate transporter gene in tobacco cultured cells enhances cell growth under phosphate-limited conditions. Proc Natl Acad Sci USA;94:7098-7102.

[1482] Miyazawa, Y, Sakai, A, Miyagishima, S, Takano, H, Kawano, S, Kuroiwa, T. 1999 Auxin and cytokinin have opposite effects on amyloplast development and the expression of starch synthesis genes in cultured bright yellow-2 tobacco cells. Plant Physiol;121:461-469.

[1483] Mizoguchi, T, Irie, K, Hirayama, T, Hayashida, N, Yamaguchi-Shinozaki, K, Matsumoto, K, Shinozaki, K. Proc. Natl. Acad. Sci USA Jan. 23, 1996;93(2):765-769.

[1484] Mizukami, Y. 2001 A matter of size: developmental control of organ size in plants. Curr. Opin. Plant Biol;4(6):533-539.

[1485] Mizuuchi, K, Kemper, B, Hays, J, Weisberg, R A. 1983 T4 endonuclease VII cleaves holiday structures. Cell;29:357-365.

[1486] Mock, J J, Pearce, R B. 1975 An ideotype of maize. Euphytica;24:613-623.

[1487] Moffatt, B A, Wang, L, Allen, M S, Stevens, Y Y, Qin, W, Snider, J, von Schwartzenberg, K. 2000 Adenosine kinase of Arabidopsis. Kinetic properties and gene expression. Plant Physiol; 124:1775-1785.

[1488] Möhlmann, T, Tjaden, J, Schwöppe, C, Winkler, H H, Kampfenkel, K, Neuhaus, H E. 1998 Occurence of two plastidic ATP/ADP transporters in Arabidopsis thaliana: Molecular characterisation and comparative structural analysis of homologous ATP/ADP translocators from plastids and Rickettsia prowazekii. Eur. J. Biochem;252:353-359.

[1489] Momand, J, Zambetti, G P, Olson, D C, George, D, Levine, A J. 1992 The mdm-2 oncogene product forms a complex with the p53 protein and inhibits p53-mediated transactivation. Cell;69: 1237-1245.

[1490] Montgomery, B L, Yeh, K C, Crepeau, M W, Lagarias, J C. 1999 Modification of distinct aspects of photomorphogenesis via targeted expression of mammalian biliverdin reductase in transgenic Arabidopsis plants. Plant Physiol;121:629-639.

[1491] Moore, A L, Siedow, J N. 1991 The regulation and nature of the cyanide-resistant alternative oxidase of plant mitochondria. Biochim. Biophys. Acta; 1059:121-140.

[1492] Moorhead, G, Douglas, P, Cotelle, V, Harthill, J, Morrice, N, Meek, S, Deiting, U, Stitt, M, Scarabel, M, Aitken, A, MacKintosh, C. 1999 Phosphorylation-dependent interactions between enzymes of plant metabolism and 14-3-3 proteins. Plant J; 18:1-12.

[1493] Moose, S P, Sisco, P H. Glossy15 an APETALA2-loke gene from maize that regulates leaf epidermal cell identity. Genes and Development. 1996;10:3018-3027.

[1494] Moose, S P, Sisco, P H. Glossyl 5 controls the epidermal juvenile-to-adult phase transition in Maize. The Plant Cell. 1994;6:1343-1355.

[1495] Morelli, G, Ruberti, I. 2000 Shade avoidance responses. Driving auxin along lateral roots. Plant Physiol;122:621-626.

[1496] Moreno, M A, Harper, L C, Krueger, R W, Dellaporta, S L, Freeling, M. 1997 liguleless1 encodes a nuclear-localized protein required for induction of ligules and auricles during maize leaf organogenesis. Genes Dev;11:616-628.

[1497] Morgan, D O. 1995 Principles of CDK regulation. Nature;374:131-134.

[1498] Mori, H, Inoue, M, Yano, M, Wakabayashi, H, Kido, H. 2000 14-3-3tau associates with a translational control factor FKBP12-rapamycin-associated protein in T-cells after stimulation by pervanadate. FEBS Lett;467:61-64.

[1499] Morrissey P J, Glick R E and Melis A 1989 Supramolecular assembly and function of subunits associated with the chlorophyll a-b light-hatvesting complex II (LHCII) in soybean chloroplast. Plant Cell Physiol. 30: 335-344.

[1500] Morsomme, P, Dambly, S, Maudoux, O, and Boutry, M. 1998 Single point mutations distributed in 10 soluble and membrane regions of the Nicotiana plumbaginifolia plasma membrane PMA2 H⁺-ATPase activate the enzyme and modify the structure of the C-terminal region. J. Biol. Chem; 273:34837-34842.

[1501] Morsomme, P, de Kerchove d'Exaerde, A, De Meester, S, Thines, D, Goffeau, A, and Boutry, M. 1996 Single point mutations in various domains of a plant plasma membrane H⁺-ATPase expressed in S. cerevisiae increase H⁺-pumping and permit yeast growth at low pH. EMBO J;20:5513-5526.

[1502] Mothe-Satney, I, Brunn, G J, McMahon, L P, Capaldo, C T, Abraham, R T, Lawrence, J C Jr. 2000 Mammalian target of rapamycin-dependent phosphorylation of PHAS-I in four (S/T)P sites detected by phospho-specific antibodies. J Biol Chem;275:33836-33843.

[1503] Muehlbauer, G J, Fowler, J E, Girard, L, Tyers, R, Harper, L, Freeling, M. 1999 Ectopic expression of the maize homeobox gene liguleless3 alters cell fates in the leaf. Plant Physiol;119:651-662.

[1504] Muller, V, Basset, G, Nelson, D R, Klingenberg, M. 1996 Probing the role of positive residues in the ADP/ATP carrier from yeast. The effect of six arginine mutations on oxidative phosphorylation and AAC expression. Biochem;35:16132-16143.

[1505] Müller, V, Heidkämper, D, Nelson, D R, Klingenberg, M. 1997 Mutagenesis of some positive and negative residues occuring in repeat triad residues in the ADP/ATP carrier from yeast. Biochemistry;36: 16008-16018.

[1506] Munnik, T. 2001 Phosphatidic acid: an emerging plant lipid second messenger. Trds PI. Sci;6:227-233.

[1507] Munnik, T, de Vrije, T, Irvine, R F, and Musgrave, A. 1996 Identification of diacylglycerol pyrophosphate as a novel metabolic product of phosphatidic acid during G-protein activation in plants. J. Biol. Chem;271:15708-15715

[1508] Munnik, T, Irvine, R F, and Musgrave, A. 1998a Phospholipid signaling in plants. Biochim. Biophys. Acta;1389:222-272

[1509] Munnik, T, Vanhimbergen, J A., Terriet, B, Braun, F J, Irvine, R F, Vandenende, H, and Musgrave, A. 1998b Detailed analysis of the turnover of polyphosphoinositides and phosphatidic acid upon activation of phospholipases C and D in Chlamydomonas cells treated with non-permeabilizing concentrations of mastoparan. Planta;207:133-145.

[1510] Murakami, S, Kondo, Y, Nakano, T, Sato, F. 2000 Protease activity of CND41, a chloroplast nucleoid DNA-binding protein, isolated from cultured tobacco cells. FEBS Lett;468:15-18.

[1511] Murakami, T, Anzai, H, Imai, S, Satoh, A, Nagaoka, K, Thompson, C J. Mol Gen Genet 1986;205:42-50.

[1512] Murakami, Y, Ichiba, T, Matsufuji, S, Hayashi, S. 1996 Cloning of antizyme inhibitor, a highly homologous protein to ornithine decarboxylase. J Biol Chem;271 :3340-3342.

[1513] Murakami, Y, Matsufuji, S, Miyazaki, Y, Hayashi, S. 1994 Forced expression of antizyme abolishes omithine decarboxylase activity, suppresses cellular levels of polyamines and inhibits cell growth. Biochem J;304:183-187.

[1514] Muramoto, T, Kohchi, T, Yokota, A, Hwang, I, Goodman, H M. 1999 The Arabidopsis photomorphogenic mutant hy1 is deficient in phytochrome chromophore biosynthesis as a result of a mutation in aplastid heme oxygenase. Plant Cell;11:335-348.

[1515] Murchie, E H and Horton, P. 1997. Acclimation of photosynthesis to irradiance and spectral quality in British plant species: Chlorophyll content, photosynthetic capacity and habitat preference. Plant Cell Environment;20:438-448.

[1516] Mussig, C, Biesgen, C, Janina, L, Uwer, U, Weiler, E, Altmann, T. 2000 A novel stress-inducible 12-oxophytodienoate reductase from Arabidopsis thaliana provides a potential link between Brassinosteroid-action and Jasmonic-acid synthesis. J Plant Physiol;157:143-152.

[1517] Muyrers, J P, Zhang, Y, Buchholz, F, Stewart, A F. 2000 RecE/RecT and Redalpha/Redbeta initiate double-stranded break repair by specifically interacting with their respective partners. Genes Dev;14:1971-1982.

[1518] Nagano, Y, Okada, Y, Narita, H, Asaka, Y, Sasaki, Y. 1995 Location of light-repressible, small GTP-binding protein of the YPT/rat family in the growing zone of eliolated pea stems. Proc. Natl. Acad. Sci;92:6314-6318.

[1519] Nakafuku, M, Obara, T, Kaibuchi, K Miyajima, I, Miyajima, A, Itoh, H, Nakamura, S, Arai, K, Matsumoto, K, Kaziro, Y. 1988 Isolation of a second yeast Saccharomyces cerevisiae gene (GPA2) coding for guanine nucleotide-binding regulatory protein: studies on its structure and possible functions. Proc. Natl. Acad. Sci USA;85:1374-1378.

[1520] Nakano, T, Murakami, S, Shoji, T, Yoshida, S, Yamada, Y, Sato, F. 1997 A novel protein with DNA binding activity from tobacco chloroplast nucleoids. Plant Cell;9:1673-1682.

[1521] Nakashima, T, Sekiguchi, T, Kuraoka, A, Fukushima, K, Shibata, Y, Komiyama, S, Nishimoto, T. 1993 Molecular cloning of a human cDNA encoding a novel protein, DAD1, whose defect causes apoptotic cell death in hamster BHK21 cells. Mol Cell Biol;13:6367-74.

[1522] Napoli, C A, Beveridge, C A, Snowden, K C. 1999 Reevaluating concepts of apical dominance and the control of axillary bud outgrowth. Curr Top Dev Biol;44: 127-169.

[1523] Nathan, D F, Vos, M H, Lindquist, S. 1997 In vivo functions of the Saccharomyces cerevisiae Hsp90 chaperone. Proc Natl Acad Sci USA;94:12949-12956.

[1524] Nathan, D F, Vos, M H, Lindquist, S. 1999 Identification of SSF1, CNS1, and HCH1 as multicopy suppressors of a Saccharomyces cerevisiae Hsp90 loss-of-function mutation. Proc Natl Acad Sci USA;96:1409-1414.

[1525] Neff, M, Nguyen, S, Malancharuvil, E, Fujioka, S, Noguchi, T, Seto ,H, Tsubuke, M, Honda, T, Takatsuto, S, Yoshida, S, Chory, J. 1999. BAS1: A gene regulating brassinosteroid levels and light responsiveness in Arabidopsis. Proc. Nat. Acad. Sci;96(26):15316-15323.

[1526] Neff, M M, Frankhauser, C, Chory, J. 2000 Light: an indicator of time and place. Genes Devel;14:257-271.

[1527] Nelson, D C, Lasswell, J, Rogg, L E, Cohen, M A, Bartel, B. 2000 FKF1, a clock-controlled gene that regulates the transition to flowering in Arabidopsis. Cell;101:331-340.

[1528] Nelson, D R, Lawson, J E, Klingenberg, M, Douglas, M G. 1993 Site-directed mutagenesis of the yeast mitochondrial ADP/ATP translocator. J. Mol. Biol;230:1159-1170.

[1529] Nelson, O E Jr and Chang, M T. 1974. Effect of multiple aleurone layers on the protein and amino acid content of maize endosperm. Crop Sci;14:374-376.

[1530] Neuhaus, H E, Thom, E, Mohlmann, T, Steup, M, Kampfenkel, K. Characterization of a novel eukaryotic ATP/ADP translocator located in the plastid envelope of Arabidopsis thaliana L. Plant J January 1997;11(1):73-82.

[1531] Ni, M, Tepperman, J M, Quail, P H. 1999 Binding of phytochrome B to its nuclear signalling partner PIF3 is reversibly induced by light. Nature;400:781-784.

[1532] Nicholson, R L, Kollipara, S S, Vincent, J R, Lyons, P C, Cadena-Gomez, G. 1987 Phytoalexin synthesis by the sorghum mesocotyl in response to infection by pathogenic and nonpathogenic fungi. Proc. Natl. Acad. Sci. USA;84:5520-5524.

[1533] Nieto-Sotelo, J, Ichida, A, Quail, P H. 1994 PF1: an A-T hook-containing DNA binding protein from rice that interacts with a functionally defined d(AT)-rich element in the oat phytochrome A3 gene promoter. Plant Cell;6:287-301.

[1534] Nieto-Sotelo, J, Kannan, K B, Martinez, L M, Segal, C. 1999 Characterization of a maize heat-shock protein 101 gene, HSP101, encoding a ClpB/Hsp100 protein homologue. Gene;230: 187-195.

[1535] Nieto-Sotelo, J, Martinez, L M and Meely, R. 2000 Maize Genetics Conference Abstracts 42:P126.

[1536] Nigg, E A. 1996 Cyclin-dependent kinase 7: at the cross-roads of transcription, DNA repair and cell cycle control? Curr Opin Cell Biol;8:312-317.

[1537] Nikawa, J, Tsukagoshi, Y, and Yamashita, S. 1986. Cloning of a gene encoding choline transport in Saccharomyces cerevisiae. J Bacteriol;166:328-330.

[1538] Nishimura, A, Tamaoki, M, Sakamoto, T, Matsuoka, M. 2000 Over-expression of tobacco knottedl-type class1 homeobox genes alters various leaf morphology. Plant Cell Physiol;41 :583-590.

[1539] Nishizawa, A N, Buchanan, B B. Enxyme regulation in C4 photosynthesis. Purification and properties of thioredoxin-linked fructose bisphosphatase and sedoheptulose bisphosphatase from corn leaves. J Biol Chem Jun. 25, 1981;256(12):6119-6126.

[1540] Niyogi, K K. 1999. Photoprotection revisited: Genetic and molecular approaches. Ann. Rev. Plant Physio. Plant Mol. Biol:50;333-359.

[1541] Nuccio, M., Ziemak, M., Henry, S., Weretilnyk, E. and Hanson A. 2000 cDNA cloning of phosphoethanolomine N-methyltransferase from spinach by Schizosaccharomyces pombe and characterization of the recombinant enzyme. The Journal of Biological Chemistry;275,19:14095-14101.

[1542] Nuccio, M L, McNeiol, S D, Ziemak, M J, Hanson, A D, Jain, R K, and Selvaraj, G. Choline import into chloroplasts limits glycine betaine synthesis in tobacco: Analysis of plants engineered with a chloroplastic or a cytosolic pathway. Metabolic Engineering; 2000;2:300-311.

[1543] O'Regan, S, Traiffort, E, Ruat, M, Cha, N, Compaore, D, and Meunier, M F. An electric lobe suppressor for a yeast choline transport mutation belongs to a new family of transporter-like proteins. Proc. Natl Acad Sci USA Feb. 15, 2000;97(4):1835-1840.

[1544] Ober, D, Hartmann, T. 1999a Deoxyhypusine synthase from tobacco. cDNA isolation, characterization, and bacterial expression of an enzyme with extended substrate specificity. J Biol Chem;274:32040-32047.

[1545] Ober, D, Hartmann, T. 1999b Homospermidine synthase, the first pathway-specific enzyme of pyrrolizidine alkaloid biosynthesis, evolved from deoxyhypusine synthase. Proc Natl Acad Sci USA;96:14777-14782.

[1546] Odell, J T, Nagy, F, Chua, N H. Promoter sequences from the caluiflower mosaic virus genome. Nature 1985;313:810-812.

[1547] Ogawa, H, Imai, S, Shimizu, T, Satoh, A, Kojima, M. Cosynthesis and protoplast fusion by mutants of bialaphos (AMPBA) producing Streptomyces hygroscopicus. J Antibiot (Tokyo) August 1983;36(8):1040-1044.

[1548] Oh, S A, Park, J H, Lee, G I, Paek, K H, Park, S K, Nam, H G. 1997 Identification of three genetic loci controlling leaf senescence in Arabidopsis thaliana. Plant J;12:527-535.

[1549] Ohad, N, Margossian, L, Hsu, Y. -C, Williams, C, Repetti, P, and Fischer, R L. 1996 A mutation that allows endosperm development without fertilization. Proc. Natl. Acad. Sci. USA;93:5319-5324.

[1550] Ohad, N, Yadegari, R, Margossian, L, Hannon, M, Michaeli, D, Harada, J J, Goldberg, R B, Fischer, R L. 1999 Mutations in FIE, a WD polycomb group gene, allow endosperm development without fertilization. Plant Cell;11:407-416.

[1551] Oka et al., Mol Gen Genet, May 4, 1979, 172(2):151-9

[1552] Okamuro, J K, Caster, B, Villarroel, R, Van Montagu, M, Jofuku, K D. The AP2 domain of APETALA2 defines a large new family of DNA binding proteins in Arabidopsis. Proc Natl Acad Sci USA Jun. 24, 1997;94(13):7076-7081.

[1553] Olien, C R, Smith, M N. 1977 Ice adhesions in relation to freeze stress. Plant Physiol;60:499-503.

[1554] Omata, T, Price, G D, Badger, M R, Okamura, M, Gohta, S and Ogawa, T. 1999 Identification of an ATP-binding cassette transporter involved in bicarbonate uptake in the cyanobacterium Synechococcus sp. Strain PCC 7942. Proc. Natl. Acad. Sci. USA;96(23):13571-13576.

[1555] Omirulleh, S, Abraham, M, Golovkin, M, Stefanov, I, Karabaev, M K, Mustardy, L, Morocz, S, Dudits, D. Activity of a chimeric promoter with the doubled CaMV 35S enhancer element in protoplast-derived cells and transgenic plants in maize. Plant Mol Biol February 1993;21(3):415-428.

[1556] Oparka, K J, Duckett, C M, Prior, D A M, and Fisher, D B. 1994 Real-time imaging of phloem unloading in the root tip of Arabidopsis. Plant J;6:759-766.

[1557] Opsahl-Ferstad, H -G, Le Deunff, E, Dumas, C, Rogowsky, P M. 1997 ZmEsr, a novel endosperm-specific gene expressed in a restricted region around the maize embryo. Plant J;12:235-246.

[1558] Oram, M, Keeley, A, Tsaneva, I. 1998 Holliday junction resolvase in Schizosaccharomyces pombe has identical endonuclease activity to the CCE1 homologue YDC2. Nucleic Acids Res;26:594-601.

[1559] Ori, N, Juarez, M T, Jackson, D, Yamaguchi, J, Banowetz, G M, Hake, S. 1999 Leaf senescence is delayed in tobacco plants expressing the maize homeobox gene knotted1 under the control of a senescence-activated promoter. Plant Cell;11: 1073-1080.

[1560] Orzaez, D, de Jong, A J, Woltering, E J. 2001 A tomato homologue of the human protein PIRIN is induced during programmed cell death. Plant Mol Biol;46:459-468.

[1561] Oster, U, Tanaka, R, Tanaka, A, Rudiger, W. Cloning and functional expression of the gene encoding key enzyme for chlorophyll b biosynthesis (CAO) from Arabidopsis thaliana. Plant J February 2000;21(3):305-310.

[1562] Osterlund, M T, Hardtke, C S, Wei, N, Deng, X W. 2000 Targeted destabilization of HY5 during light-regulated development of Arabidopsis. Nature;405:462-466.

[1563] Oufattole, M, Arango, M, Boutry, M. 2000 Identification and expression of three new Nicotiana plumbaginifolia genes which encode isoforms of a plasma-membrane H+-ATPase, and one of which is induced by mechanical stress. Planta;210:715-722.

[1564] Ourisson, G. 1994 Pecularities of sterol biosynthesis in plants. J. Plant Physiol;143: 434-439.

[1565] Ouyang, Y b, Lane, W S, Moore, K L. 1998 Tyrosylprotein sulfotransferase: purification and molecular cloning of an enzyme that catalyzes tyrosine 0-sulfation, a common posttranslational modification of eukaryotic proteins. Proc Natl Acad Sci USA;95:2896-2901.

[1566] Overall, R L, Blackman, L M. 1996 A model for macromolecular structure of plasmodesmata. Trends Plant Sci;1:207-211.

[1567] Ow, D W, Wood, K V, DeLuca, M, De Wet, J R, Helinski, D R, Howell, S H. Transient and stable expression of the firefly luciferase gene in plant calls and transgenic plants. Science Nov. 14, 1986; 234:856-859.

[1568] Ozcan, S, and Johnston, M. 1995 Three different regulatory mechanisms enable yeast hexose transporter (HXT) genes to be induced by different levels of glucose. Mol Cell Biol;15:1564-1572.

[1569] Padmanabhan, V, Dias, D M, Newton, R J. 1997 Expression analysis of a gene family in loblolly pine (Pinus taeda L.) induced by water deficit stress. Plant Mol Biol;35:801-807.

[1570] Padmavati, M, Reddy, A R. 1999 Flavonoid biosynthetic pathway and cereal defence response: an emerging trend in crop biotechnology. Plant Biochem. Biotechnol;8:15-20.

[1571] Padmavati, M, Sakthivel, N, Thara, K V, Reddy, A R. 1997 Differential sensitivity of rice pathogens to growth inhibition by flavonoids. Phytochem;46(3):499-502.

[1572] Palmgren, M G. 1998 Proton gradients and plant growth: Role of the plasma membrane H⁺-ATPase. Adv. Bot. Res;28:1-70.

[1573] Palmgren, M G., and Christensen, G. 1994 Functional comparisons between plant plasma membrane H⁺-ATPase isoforms expressed in yeast. J. Biol. Chem;269:3027-3033.

[1574] Pan, L, Kawai, M, Yu, L H, Kim, K M, Hirata, A, Umeda, M, Uchimiya, H 2001 The Arabidopsis thaliana ethylene-responsive element binding protein (AtEBP) can function as a dominant suppressor of Bax-induced cell death of yeast. FEBS Lett;508:375-378.

[1575] Pan, L, Kawai, M, Yano, A, Uchimiya, H. 200) Nucleoside diphosphate kinase required for coleoptile elongation in rice. Plant Physiol;122:447-452.

[1576] Pan, R C, Gu, H. 1995 Effect of methyl jasmonate in the growth and drought resistance in peanut seedlings. Acta Phytophysiologica Simica;21:215-220.

[1577] Pare, P W, Albom, H T, Tumlinson, J H. 1998 Concerted biosynthesis of an insect elicitor of plant volatiles. Proc Natl Acad Sci USA;95:13971-13975.

[1578] Park, M H, Cooper, H L and Folk, J E. 1982 The biosynthesis of protein-bound hypusine (N-(4-amino-2-hydroxybutyl)lysine). Lysine as the amino acid precursor and the intermediate role of deoxyhypusine (N-(4-aminobutyl)lysine). J. Biol. Chem.;257:7217-7222.

[1579] Park, M H, Lee, Y B, Joe, Y A. 1997 Hypusine is essential for eukaryotic cell proliferation. Biol Signals;6:115-123.

[1580] Park, M H, Wolff, E C, Folk, J E. 1993 Hypusine: its post-translational formation in eukaryotic initiation factor 5A and its potential role in cellular regulation. Biofactors;4:95-104.

[1581] Park, Y, Karlsson, J, Rojdestvensk,i I, Pronina, N, Klimov, V, Oquist, G and Samuelsson, G. 1999 Role of a novel photosystem II-associated carbonic anhydrase in photosynthetic carbon assimilation in Chlamydomonas reinhardtii. FEBS Letters;444:102-105.

[1582] Parks, B M, Quail, P H, Hangarter, R P. 1996 Phytochrome A regulates red-light induction of phototropic enhancement in Arabidopsis. Plant Physiol;110:155-162.

[1583] Parsons, C A, Baumann, P, Van Dyck, E, West, S C. 2000 Precise binding of single-stranded DNA termini by human RAD52 protein. EMBO J. 2000;19:4175-4181.

[1584] Partaledis, J A and Berlin, V. 1993 The FKB2 gene of Saccharomyces cerevisiae, encoding the immunosuppressant-binding protein FKBP-13, is regulated in response to accumulation of unfolded proteins in the endoplasmic reticulum. PNAS (USA);90:5450-5454.

[1585] Paszkowski, J, Shillito, R D, Saul, M, Mandak, V, Hohn, T, Hohn, B, Potrykus, I. Direct gene transfer to plants. EMBO Journal 1984;3(12):2717-2722.

[1586] Patel, S., Morris, S. A., Adkins, C. E., O'beirne, G. and Taylor, C. W. 1997 Ca²⁺-independent inhibition of inositol trisphosphate receptors by calmodulin. Redistribution of calmodulin as a possible means of regulating Ca²⁺ mobilization. Proc. Natl Acad Sci. USA;94:11627-11632.

[1587] Patil, C, Walter, P. 2001 Intracellular signaling from the endoplasmic reticulum to the nucleus: the unfolded protein response in yeast and mammals. Curr Opin Cell Biol;13(3):349-355.

[1588] Patrick, J W. 1997 Phloem unloading: Sieve element unloading and post-sieve element transport. Annu. Rev. Plant Physiol. Plant Mol. Biol.;48:191-222.

[1589] Patterson, G W, Hugly, S, and Harrison, D. 1993 Sterols and phytyl esters of Arabidopsis thaliana under normal and chilling temperatures. Phytochemistry;33:1381-1383.

[1590] Pearce, G, Strydom, D, Johnson, S, Ryan C. A polypeptide from tomato leaves induces wound-inducible proteinase inhibitor proteins. Science Aug. 23, 1991;253:895-898.

[1591] Peat, T S, Newman, J, Waldo, G S, Berendzen, J, Terwilliger, T C. 1998 Structure of translation initiation factor 5A from Pyrobaculum aerophilum at 1.75 A resolution. Structure. 1998;6:1207-1214.

[1592] Pechan, T, Jiang, B, Steckler, D, Ye, L, Lin, L, Luthe, D S, Williams, W P. 1999 Characterization of three distinct cDNA clones encoding cysteine proteinases from maize (Zea mays L.) callus. Plant Mol Biol;40:111-119.

[1593] Pechan, T, Ye, L, Chang, Y m, Mitra, A, Lin, L, Davis, F M, Williams, W P, Luthe, D S. 2000 A unique 33-kD cysteine proteinase accumulates in response to larval feeding in maize genotypes resistant to fall armyworm and other lepidoptera. Plant Cell; 12:1031-1040.

[1594] Pelletier, M K, Burbulis, I E, Winkel-Shirely, B. Disruption of specific flavonoid genes enhances the accumulation of flavonoid enzymes and end-products in Arabidopsis seedlings. Plant Mol Biol May 1999;40(1):45-54.

[1595] Peng, J, Richards, D E, Hartley, N M, Murphy, G P, Devos, K M, Flintham, J E, Beales, J, Fish, L J, Worland, A J, Pelica, F, Sudhakar, D, Christou, P, Snape, J W, Gale, M D, Harberd, N P. 1999 ‘Green revolution’ genes encode mutant gibberellin response modulators. Nature;400:256-261.

[1596] Penninckx, I A M A, Thomma, B P H J, Buchala, A, Metraux, J. -P, and Broekaert, W F. 1998 Concomitant activation of a jasmonate and ethylene response pathways is required for induction of a plant defensin gene in Arabidopsis. Plant Cell;10:2103-2113.

[1597] Peskan, T, Oelmuller, R. 2000 Heterotrimeric G-protein beta-subunit is localized in the plasma membrane and nuclei of tobacco leaves. Plant Mol Biol;42:915-922.

[1598] Petit, J M, van Wuytswinkel, O, Briat, J -F, Lobreaux, S. Characterization of an Iron-Dependent Regulatory Sequence (IDRS) involved in the transcriptional control of AtFer1 and ZmFer1 plant ferritin genes by iron. J. Biol.Chem. Feb. 23, 2001;276(8):5584-5590.

[1599] Petukhova, G, Sung, P, Klein, H. 2000 Promotion of Rad5 1-dependent D-loop formation by yeast recombination factor Rdh54/Tid1. Genes Dev;14:2206-2215.

[1600] Petzold, U, Peschel, S, Dahse, I, Adam, G. 1992. Stimulation of source-applied 14-C-Sucrose export in Vicia faba plants by brassinosteroids, GA3 and IAA. Acta Bot Neerl;41 :469-479.

[1601] Pical, C, Westergren, T, Dove, S K, Larsson, C, Sommarin, M. 1999 Salinity and hyperosmotic stress induce rapid increases in phosphatidylinositol 4,5-bisphosphate, diacylglycerol pyrophosphate, and phosphatidylcholine in Arabidopsis thaliana cells. J. Biol. Chem;274:38232-38240.

[1602] Picard, D, Khursheed, B, Garabedian, M J, Fortin, M G, Lindquist, S, Yamamoto, K R. 1990 Reduced levels of hsp90 compromise steroid receptor action in vivo. Nature;348:166-168.

[1603] Pichon, O, Desbiez, M -O. 1994 Is cytoplasmic pH involved in the regulation of cell cycle in plants? Physiol Plant;92:261-265.

[1604] Pickart, C M. 2001 Mechanisms underlying ubiquitination. Annu Rev Biochem;70:503-533.

[1605] Piotrowski, M, Morsomme, P, Boutry, M, and Oecking, C. 1998 Complementation of the Saccharomyces cerevisiae plasma membrane H⁺-ATPase by a plant H⁺-ATPase generates a highly abundant fusicoccin binding site. J. Biol. Chem;273:30018-30023.

[1606] Pirrotta, V. 1998 Polycombing the genome: PcG, trxG, and chromatin silencing. Cell;93:333-336.

[1607] Pittman, R H, Andrews, M T, Setzer, D R. 1999 A feedback loop coupling 5 S rRNA synthesis to accumulation of a ribosomal protein. J Biol Chem;274:33198-33201.

[1608] Plakidou-Dymock, S, Dymock, D, Hooley, R. 1998 A higher plant seven-transmembrane receptor that influences sensitivity to cytokinins. Curr. Biol;8:315-324.

[1609] PlantCARE database: PlantCARE, a plant cis-acting regulatory element database. S. Rombauts, P. Dehais, M. Van Montagu and P. Rouze. Nucleic Acids Res (1999). Vol:27-(1) p:295-296

[1610] Plaxton, W C. 1996 The organization and regulation of plant glycolysis. Annu. Rev. Plant Physiol. Plant Mol. Biol;47: 185-214.

[1611] Ponting, C P, Blake, D J, Davies, K E. 1996 ZZ and TAZ: new putative zinc fingers in dystrophin and other proteins. Trends Biochem Sci;21:11-13.

[1612] Poole, R K, Hughes, M N. 2000 New functions for the ancient globin family: bacterial responses to nitric oxide and nitrosative stress. Mol Microbiol; 36:775-783.

[1613] Pozuelo, M, MacKintosh, C, Galvan, A, Fernandez, E. 2001 Cytosolic glutamine synthetase and not nitrate reductase from the green alga Chlamydomonas reinhardtii is phosphorylated and binds 14-3-3 proteins. Planta;212:264-269.

[1614] Prandl, R, Hinderhofer, K, Eggers-Schumacher, G, Schoffl, F. 1998 HSF3, a new heat shock factor from Arabidopsis thaliana, derepresses the heat shock response and confers thermotolerance when overexpressed in transgenic plants. Mol Gen Genet;258:269-278.

[1615] Prasher, D, McCann, R O, Cormier, M J. Cloning and expression of the cDNA coding for aequorin, a bioluminescent calcium-binding protein. Biochem Biophys Res Commun 1985;126(3):1259-1268.

[1616] Pratt, W B, Silverstein, A M, Galigniana, M D. 1999 A model for the cytoplasmic trafficking of signalling proteins involving the hsp90-binding immunophilins and p50cdc37. Cell Signal;11:839-851.

[1617] Premachandra, G S, Hahn, D T, Axtell, J D and Joly, R J. Epicuticular wax load and water-use efficiency on Bloomless and sparse-bloom mutants of Sorghum bicolor. L. Environmental and Experimental Botany 1994;34(3):293-301.

[1618] Preston, G M, Carroll, T P, Guggino, W B, and Agre, P. 1992 Appearance of water channels in Xenopus oocytes expressing red cell CHIP28 protein. Science;256:385-387.

[1619] Preuss, D. 1999 Chromatin silencing and Arabidopsis development: A role for polycomb proteins. Plant Cell;11:765-768.

[1620] Pringa, E, Martinez-Noel, G, Muller, U, Harbers, K. 2001 Interaction of the ring finger-related u-box motif of a nuclear dot protein with ubiquitin-conjugating enzymes. J Biol Chem;276:19617-19623.

[1621] Prioul, J L. 1992 Source-sink manipulations and carbohydrate metabolism in maize. Crop Science;32:751-756.

[1622] Prodromou, C, Siligardi, G, O'Brien, R, Woolfson, D N, Regan, L, Panaretou, B, Ladbury, J E, Piper, P W, Pearl, L H. 1999 Regulation of Hsp90 ATPase activity by tetratricopeptide repeat (TPR)-domain co-chaperones. EMBO J;18:754-762.

[1623] Provencher, Laurel Mezitt, Miao, Long, Sinha, Neelima and Lucas William J. 2001 Sucrose Export Defective 1 Encodes a Novel Protein Implicated in Chloroplast-to-Nucleus Signaling. Plant Cell, 2001;13(5):1127-1141.

[1624] Pysh, L D, Wysocka-Diller, J W, Camilleri, C, Bouchez, D, Benfey, P N. 1999 The GRAS gene family in Arabidopsis: sequence characterization and basic expression analysis of the SCARECROW-LIKE genes. Plant J;18:111-119.

[1625] Qin, M, Kuhn, R, Moran, S, Quail, P H. 1997 Overexpressed phytochrome C has similar photosensory specificity to phytochrome B but a distinctive capacity to enhance primary leaf expansion. Plant J;12:1163-1172.

[1626] Queitsch, C, Hong, S W, Vierling, E, Lindquist, S. 2000 Heat shock protein 101 plays a crucial role in thermotolerance in Arabidopsis. Plant Cell;12:479-492.

[1627] Quirino, B F, Reiter, W D, Amasino, R D. 2001 One of two tandem Arabidopsis genes homologous to monosaccharide transporters is senescence-associated. Plant Mol Biol;46:447-457.

[1628] Raghothama, K G. 1999 Phosphate Acquisition. Annu. Rev. Plant Physiol;50:665-693. Raines, C, Lloyd, J, Dyer, T. Review article. New insights into the structure and function of sedoheptulose-1,7-biphosphatase; an important but neglected Calvin cycle enzyme. J Experimental Botany 1999;50:1-8.

[1629] Raines, C A, Lloyd, J C, Willingham, N M, Potts, S, Dyer T A. cDNA and gene sequences of wheat chloroplast sedoheptulose-1,7-bisphosphatase homology with fructose-1,6-bisphosphatases. Eur J Biochem May 1, 1992;205(3):1053-1059.

[1630] Rajashekar, C B, Burke, M J. Freezing characteristics of rigid plant tissues: Development of cell tension during extracellular freezing. Plant Physiol 1996; 111: 597-603.

[1631] Rajashekar, C B, Lafta, A. 1996 Cell-wall changes and cell tension in repsonse to cold acclimation and exogenous abscisic acid in leaves and cell cultures. Plant Physiol;111:605-612.

[1632] Ramaratnam, N, Osawa, T, Namiki, M, Kawakishi, S. 1989 Chemical studies on novel rice hull antioxidants. 2. Identification of isovitexin, a C-glycosyl flavonoid. J. Agric. Food Chem;37:316-319.

[1633] Ramirez-Parra, E, Gutierrez, C. 2000 Characterization of wheat DP, a heterodimerization partner of the plant E2F transcription factor which stimulates E2F-DNA binding. FEBS Lett;486:73-78.

[1634] Ramirez-Parra, E, Xie, Q, Boniotti, M, and Gutierrez, C. 1999. The cloning of plant E2F, a retinoblastoma-binding protein reveals unique and conserved features with animal G₁/S regulators. Nucleic Acids Research;27(17):3527-3533.

[1635] Ramputh, A -I, Bown, A W. 1996 Rapid-aminobutyric acid synthesis and the inhibition of the growth and development of oblique-banded leaf-roller larvae. Plant Physiol; 111:1349-13 54.

[1636] Rao, M V, Lee, H, Creelman, R A, Mullet, J E, Davis, K R. 2000 Jasmonic Acid Signaling Modulates Ozone-Induced Hypersensitive Cell Death. Plant Cell;12:1633-1646.

[1637] Raskin, I, Turner, I M, Melander, W R. 1989 Regulation of heat production in the inflorescences of an Arum lily by endogenous salicyclic acid. Pro. Natl. Acad. Sci. USA;86:2214-2218.

[1638] Ratcliffe O J, Nadzan G C, Reuber T L, Riechmann J L. 2001 Regulation of flowering in Arabidopsis by an FLC homologue. Plant Physiol;126(1):122-132.

[1639] Rathinasabapathi, B, Burnet, M, Russell, B, Gage, D, Liao, P., Nyes, G, Scott, P, Golbeck, J and Hanson A. 1997. Choline momooxygenase, an unusual iron-sulfur enzyme catalyzing the first step of glycone betaine synthesis in plants: prosthetic group characterization and cDNA cloning. Proc. Natl. Acad. Sci;94:3454-3458.

[1640] Ravanko, K, Jarvinen, K, Paasinen-Sohns, A, Holtta, E. 2000 Loss of p27Kip1 from cyclin E/cyclin-dependent kinase (CDK) 2 but not from cyclin D1/CDK4 complexes in cells transformed by polyamine biosynthetic enzymes. Cancer Res;60:5244-5253.

[1641] Raven, J A. 1997 CO2-concentrating mechanisms: a direct role for thylakoid lumen acidification. Plant Cell and Environment;20:147-154.

[1642] Ravetch, J V, Horiuchi, K, Zinder, N D. Nucleotide sequences near the origin of replication of bacteriophage f1. Proc Natl Acad Sci USA October 1977;74(10):4219-4222.

[1643] Ravindra, R, Kunapuli, S P, Forman, L J, Nagele, R G, Foster, K A, Patel, S A. 1996 Effect of transient overexpression of Gq alpha on soluble and polymerized tubulin pools in GH3 and AtT-20 cells. J Cell Biochem;61:392-401.

[1644] Rea, P A 1999. MRP subfamily ABC transporters from plants and yeast. J.Exp.Bot;50, Special Issue:895-913.

[1645] Reddy, V S, Goud, K V, Sharma, R P, Reddy, A R. 1994 The ultraviolet-B responsive anthocyanin production is associated with a specific phase of phenylalanine ammonialyase biosynthesis. Plant Physiol;105:1059-1066.

[1646] Reed, Andrew, J, Below, Fred E., Hageman, Richard H. Grain protein accumulation and the relationship between leaf nitrate reductase and protease activities during grain development in maize (Zea mays L.). Plant Physiol. (1980);66:164-170.

[1647] Reed, J W, Nagpal, P, Poole, D S, Furuya, M, Chory, J. 1993 Mutations in the gene for the red/far-red light receptor phytochrome B alter cell elongation and physiological responses throughout Arabidopsis development. Plant Cell;5:147-157.

[1648] Regenberg, B, Villalba, J M, Lanfermeijer, F C, and Palmgren, M G. 1995 C terminal deletion analysis of plant plasma membrane H⁺-ATPase: Yeast as a model system for solute transport across the plant plasma membrane. Plant Cell;7:1655-1666.

[1649] Reichel, C, Mathur, J, Eckes, P, Langenkemper, K, Koncz, C, Schell, J, Reiss, B, Maas, C. Enhanced green fluorescence by the expression of an Aequorea victoria green fluorescent protein mutant in mono- and dicotyledonous plant cells. Proc Natl Acad Sci USA Jun. 11, 1996; ;93(12):5888-5893.

[1650] Reinbothe, C, Parthier, B, Reinbothe, S. 1997 Temporal pattern of jasmonate-induced alterations in gene expression of barley leaves. Planta;201:281-287.

[1651] Reintanz, B., Lehnen, M., Reichelt, M., Gershenzon, J., Kowalczyk, M., Sandberg, G., Godde, M., Uhl, R., and Palme, K. 2001. bus, a Bushy Arabidopsis CYP79F1 knockout mutant with abolished synthesis of short-chain aliphatic glucosinolates. Plant Cell;13:351-3674.

[1652] Reiss, B, Klemm, M, Kosak, H, Schel, J. 1996 RecA protein stimulates homologous recombination in plants. Proc Natl Acad Sci USA.;93:3094-3098.

[1653] Reiss, B, Schubert, I, Kopchen, K, Wendeler, E, Schell, J, Puchta, H. 2000 RecA stimulates sister chromatid exchange and the fidelity of double-strand break repair, but not gene targeting, in plants transformed by Agrobacterium. Proc Natl Acad Sci USA.;97:3358-3363.

[1654] Reuber, S, Bornman, J F, Weissenbock, G. 1996 Phenylpropanoid compounds in primary leaf tissues in rye (Secale cereale). Light response of their metabolism and the possible role in UV-B protection. Physiol. Plantarum;97:160-168.

[1655] Rhee, S K, Icho, T, Wickner, R B. 1989 Structure and nuclear localization signal of the SKI3 antiviral protein of Saccharomyces cerevisiae. Yeast;5:149-158.

[1656] Rhoads, D M, McIntosh, L. 1991 Isolation and characterization of a cDNA clone encoding an alternative oxidase protein of Sauromatum guttatum (Schott). Proc. Natl. Acad. Sci. USA;88:2122-2126.

[1657] Rhoads, D M, McIntosh, L. 1992 Salicyclic acid regulation of respiration in higher plants: alternative oxidase expression. Plant Cell;4:1131-1139.

[1658] Rhoads, D M, McIntosh, L. 1993 The salicyclic acid-inducible alternative oxidase gene aox1 and genes encoding pathogenesis-related proteins share regions of sequence similarity in their promoters. Plant Mol. Biol;21:615-624.

[1659] Ribas-Carbo, M, Wiskich, J T, Berry, J A, Siedow, J N. 1995 Ubiquinone redox behavior in plant mitochondria during electron transport. Arch. Biochem. Biophys;317:156-160.

[1660] Riccardi F, Gazeau P, de Vienne D, Zivy M. 1998 Protein changes in response to progressive water deficit in maize. Quantitative variation and polypeptide identification. Plant Physiol.;117:1253-1263.

[1661] Rice, Evans C A, Miller, N J, Paganga, G 1997. Antioxidant properties of phenolic compounds. Trends in Plant Science;2(4):152-159.

[1662] Richard, S, Drevet, C, Jouanin, L, Seguin, A. Isolation and characterization of a cDNA clone encoding a putative white spruce glycine-rich RNA binding protein. Genel999, 240(2):379-388.

[1663] Riedl, S J, Renatus, M, Schwarzenbacher, R, Zhou, Q, Sun, C, Fesik, S W, Liddington, R C, Salvesen, G S. 2001 Structural basis for the inhibition of caspase-3 by XIAP. Cell; 104:791-800.

[1664] Riesmeier, J W, Willmitzer, L, and Frommer, W B. 1992 Isolation and characterization of a sucrose carrier cDNA from spinach by functional expression in yeast. EMBO J;11:4705-4713.

[1665] Riesmeier, J W, Willmitzer, L, and Frommer, W B. 1994 Evidence for an essential role of the sucrose transporter in phloem loading and assimilate partitioning. EMBO J;13:1-7.

[1666] Rinke, J, Steitz, J A. 1982 Precursor molecules of both human 5S ribosomal RNA and transfer RNAs are bound by a cellular protein reactive with anti-La lupus antibodies. Cell; 29:149-159.

[1667] Riou-Khamlichi, C, Huntley, R, Jacqmard, A, Murray, J A. 1999 Cytokinin activation of Arabidopsis cell division through a D-type cyclin. Science;283:1541-1544.

[1668] Roberts, M R. 2000 Regulatory 14-3-3 protein-protein interactions in plant cells. Curr Opin Plant Biol 2000;3:400-405.

[1669] Roberts, M A, Wray, J L. 1996 Cloning and characterization of an Arabidopsis thaliana cDNA clone encoding an organellar isoform of serine acetyltransferase. Plant Mol Biol;30:1041-1049.

[1670] Robinson, L C, Tatchell, K. 1991 TFS1: a suppressor of cdc25 mutations in Saccharomyces cerevisiae. Mol Gen Genet;230:241-250.

[1671] Robson, P R, McCormac, A C, Irvine, A S, Smith, H. 1996 Genetic engineering of harvest index in tobacco through overexpression of a phytochrome gene. Nat Biotechnol;14:995-998.

[1672] Roessner, C A, Scott, A I. Fluorescence-based method for selection of recombinant plasmids. BioTechniques 1995;19(5):760-764.

[1673] Roitsch, T, Bittner, M, and Godt, D E. 1995 Induction of apoplastic invertase of Chenopodium rubrum by D-glucose and a glucose analog and tissue-specific expression suggest a role in sink-regulation. Plant Physiol;108:285-294.

[1674] Ross, K E, Kaldis, P, Solomon, M J. 2000 Activating phosphorylation of the Saccharomyces cerevisiae cyclin-dependent kinase, cdc28p, precedes cyclin binding. Mol Biol Cell;1:1597-1609.

[1675] Roth, D, Birkenfeld, J, Betz, H. 1999 Dominant-negative alleles of 14-3-3 proteins cause defects in actin organization and vesicle targeting in the yeast Saccharomyces cerevisiae. FEBS Lett.460:411-6.

[1676] Roth, G. 1998 High oil corn gets mixed reviews in 1997. Penn State. Department of Crop and Soil Sciences. Available at www.agronomy.psu.edu/Extension/CornManagement/articles/CA2.

[1677] Roychowdhury, S, Rasenick, M M. 1994 Tubulin-G protein association stabilizes GTP binding and activates GTPase: cytoskeletal participation in neuronal signal transduction. Biochemistry. 1994;33:9800-9805.

[1678] Rudt, F and Pieler, T. 1996 Cytoplasmic retention and nuclear import of 5S ribosomal RNA containing RNPs. EMBO J;15:1383-1391.

[1679] Ruegger, M, Dewey, E, Gray, W M, Hobbie, L, Turner, J, Estelle, M. 1998 The TIR1 protein of Arabidopsis functions in auxin response and is related to human SKP2 and yeast grr1p. Genes Dev;12:198-207.

[1680] Running, M P, Hake S. 2001 The role of floral meristems in patterning. Curr Opin Plant Biol. February 2001;4(1):69-74.

[1681] Rushton, P J et al. 1995 Members of a new family of DNA binding proteins bind to a conserved cis-elements in the promoters of alpha-Amy2 genes. Plant Mol. Biol;29:691.

[1682] Russell, B, Rathinasabapathi, and Hanson, A. 1998 Osmotic stress induces expression of choline monooxygenase in sugar beet and amaranth. Plant Physiology;116:859-865.

[1683] Russell, W A. 1991 Genetic improvement of maize yields. Adv. Agronomy;46:245-298.

[1684] Rutherford, S L, Lindquist, S. 1998 Hsp90 as a capacitor for morphological evolution. Nature;396:336-342.

[1685] Saalbach, G, Schwerdel, M, Natura, G, Buschmann, P, Christov, V, Dahse, I. 1997 Over-expression of plant 14-3-3 proteins in tobacco: enhancement of the plasmalemma K+ conductance of mesophyll cells. FEBS Lett:413:294-298.

[1686] Saibil, H. 2000 Molecular chaperones: containers and surfaces for folding, stabilising or unfolding proteins. Curr Opin Struct Biol;10:251-258.

[1687] Sairam, R. 1994 Effects of homobrassinolide application on plant metabolism and grain yield under irrigated and moisture-stress conditions of two wheat varieties. Plant Growth Regul;14:173-181.

[1688] Saisho, D, Nambara, E, Naifo, S, Tsufsumi, N, Hirai, A, Nakazono, M. 1997 Characterization of the gene family for alternative oxidase from Arabidopsis thaliana. Plant Mol.Biol;35:585-596.

[1689] Sakakibara, H, Takei, K, Sugiyama, T. Isolation and characterization of a cDNA that encodes maize uroporphyrinogen III methyltransferase, an enzyme involved in the synthesis of siroheme, which is prosthetic group of nitrite reductase. The Plant Journal November 1996;10(5):883-892.

[1690] Sakamato, A, Valverde, R, Alia, Chen T H and Murata, N. Transformation of Arabidopsis with the codA gene for choline oxidase enhances freezing tolerance of plants. Plant J. June 2000; 22(5):449-453.

[1691] Sakamoto, T, Kobayashi, M, Itoh, H, Tagiri, A, Kayano, T, Tanaka, H, Iwahori, S and Matsuoka, M. 2001 Expression of a Gibberellin 2-Oxidase gene around the shoot apex is related to phase transition in rice. Plant Physiology;125:1508-1516.

[1692] Sakurai, A, Fujioka, S. 1997 Studies on biosynthesis of brassinosteroids. Biosci. Biotechnol. Biochem;61:757-762.

[1693] Sales, K, Brandt, W, Rumbak, E, Lindsey, G. 2000 The LEA-like protein HSP 12 in Saccharomyces cerevisiae has a plasma membrane location and protects membranes against desiccation and ethanol-induced stress. Biochim Biophys Acta;1463:267-278.

[1694] Samach, A, Klenz, J E, Kohalmi, S E, Risseeuw, E, Haughn, G W, Crosby, W L. 1999 The UNUSUAL FLORAL ORGANS gene of Arabidopsis thaliana is an F-box protein required for normal patterning and growth in the floral meristem. Plant J.;20:433-445.

[1695] Sanchez, J P, Chua, N H. 2001 Arabidopsis plc1 is required for secondary responses to abscisic acid signals. Plant Cell.13:1143-1154.

[1696] Sanchez, P, de Torres, Zabala M, Grant, M. 2000 AtBI-1, a plant homologue of Bax inhibitor-1, suppresses Bax-induced cell death in yeast and is rapidly upregulated during wounding and pathogen challenge. Plant J;21:393-399.

[1697] Sanchez-Fernandez, R, Davies, T G, Coleman, J O, Rea, P A. 2001 The Arabidopsis thaliana ABC protein superfamily, a complete inventory. J Biol Chem;276:30231-30244.

[1698] Sanders, D, Brownlee, C, Harper, J F. 1999 Communicating with calcium. The Plant Cell;11:691-706.

[1699] Sarkar, G, Turner, R T, Bolander, M E. Restriction-site PCR: a direct method of unknown sequence retrieval adjacent to a known locus by using universal primers. PCR Methods Appl May 1993;2(4):318-322.

[1700] Sasaki, K, Abid, M R, Miyazaki, M. 1996 Deoxyhypusine synthase gene is essential for cell viability in the yeast Saccharomyces cerevisiae. FEBS Lett;384:151-154.

[1701] Sasse, J. 1990 Brassinolide-induced elongation and auxin. Physiol. Plant 80:401-408.

[1702] Sauer, N, Caspari, T, Klebl, F, Tanner, W. 1990a Functional expression of the Chlorella hexose transporter in S. pombe. Proc. Natl. Acad. Sci. USA;87:7949-7950.

[1703] Sauer, N, Friedlander, K, Graiml-Wicke, U. 1990b Primary structure, genomic organization and heterologous expression of a glucose transporter from A. thaliana. EMBO J;9:3045-3050.

[1704] Sauer, N, Stadler, R. 1993 A sink-specific H⁺/monosaccharide co-transporter from Nicotiana tabacum: Cloning and heterologous expression in baker's yeast. Plant J;4:601-610.

[1705] Sauer, N, Stolz, J. 1994 SUC1 and SUC2: Two sucrose transporters from Arabidopsis thaliana: Expression and characterization in baker's yeast and identification of the histidine-tagged protein. Plant J;6:67-77.

[1706] Sauer, N, Tanner, W. 1989 The hexose carrier from Chlorella. cDNA cloning of a eucaryotic H⁺-cotransporter. FEBS Lett;259:43-46.

[1707] Sauter, M. 1997 Differential expression of a CAK (cdc2-activating kinase)-like protein kinase, cyclins and cdc2 genes from rice during the cell cycle and in response to gibberellin. Plant J;11:181-190.

[1708] Savino, G, Briat, J -F, and Lobreaux, S. Inhibition of the Iron-induced ZmFer1 Maize Ferritin Gene Expression by Antioxidants and Serine/Threonine Phosphatase Inhibitors. J. Biol. Chem. 1997;272:33319-33326.

[1709] Scandalios, J G. 1990 Response of plant antioxidant defense genes to environment stress. Adv. Genet;28:1-41.

[1710] Scanlon, M J and Myers, A M. 1998 Phenotypic analysis and molecular cloning of discolored-1 (dsc1), a maize gene required for early kernel development. Plant Molecular Biology;37:483-493.

[1711] Schachtman, D P, Reid, R J, Ayling, S M. 1998 Phosphorus Uptake by Plants: From Soil to Cell. Plant Physiol;116:447-453.

[1712] Schaller, F, Biesgen, C, Mussig, C, Altmann, T. Weiler, E. 2000 12-Oxophytodienoate reductase 3 (OPR3) is the isoenzyme involved in jasmonate biosynthesis. Planta;210:979-984.

[1713] Schatz, O, Oft, M, Dascher, C, Schebesta, M, Rosorius, O, Jaksche, H, Dobrovnik, M, Bevec, D, Hauber, J. 1998 Interaction of the HIV-1 rev cofactor eukaryotic initiation factor 5A with ribosomal protein L5. Proc Natl Acad Sci USA;95:1607-1612.

[1714] Scheibe, R. 1991 Redox-modulation of chloroplast enzymes. A common principle for individual control. Plant Physiol;96:1-3.

[1715] Schimkat, D, Heineke, D, Heldt, H. 1990 Regulation of sedoheptulose-1,7-bisphosphatase by sedoheptulose-7-phosphate and glycerate, and of fructose-1,6-bisphosphatase by glycerate in spinach chloroplasts. Planta;181(1):97-103.

[1716] Schnall, R, Mannhaupt, G, Stucka, R, Tauer, R, Ehnle, S, Schwarzlose, C, Vetter, I, Feldmann, H. 1994 Identification of a set of yeast genes coding for a novel family of putative ATPases with high similarity to constituents of the 26S protease complex. Yeast;10:1141-1155.

[1717] Schneeberger, R G, Becraft, P W, Hake, S, Freeling, M. 1995 Ectopic expression of the knox homeo box gene rough sheathl alters cell fate in the maize leaf. Genes Dev;9:2292-2304.

[1718] Schnier, J, Schwelberger, H G, Smit-McBride, Z, Kang, H A, Hershey, J W. 1991 Translation initiation factor 5A and its hypusine modification are essential for cell viability in the yeast Saccharomyces cerevisiae. Mol Cell Biol. 1991;11:3105-3114.

[1719] Schopfer, C R, Nasrallah, M E, Nasrallah, J B. 1999 The male determinant of self-incompatibility in Brassica. Science;286:1697-1700.

[1720] Schrammeijer B, Risseeuw E, Pansegrau W, Regensburg-Tuink T J, Crosby W L, Hooykaas P J. 2001 Interaction of the virulence protein VirF of Agrobacterium tumefaciens with plant homologs of the yeast Skp1 protein. Curr Biol;11:258-262.

[1721] Schrick, K, Mayer, U, Horrichs, A, Kuhut, C, Bellini, C, Dangl, J, Schmitt, J, Jurgens, G. 2000 FACKEL is a sterol C-14 reductase required for organized cell division and expansion in Arabidopsis embryogenesis. Gen Dev;14:1471-1484.

[1722] Schroder, M, Chang, J S, Kaufman, R J. 2000 The unfolded protein response represses nitrogen-starvation induced developmental differentiation in yeast. Genes Dev;14(23):2962-2975.

[1723] Schroeder, Julian, Kwak, June and Allen, Gethyn. 2001 Guard cell abscisic acid signaling and engineering drought hardiness in plants. Nature;410:327-330.

[1724] Schule, T, Rose, M, Entian, K D, Thumm, M, Wolf, D H. 2000 Ubc8p functions in catabolite degradation of fructose-1,6-bisphosphatase in yeast. EMBO J;19:2161-2167.

[1725] Schuler, I, Milon, A, Nakatani, Y, Ourisson, G, Albrecht, A M, Benveniste, P, and Hartmann, M A. 1991 Differential effects of plant sterols on water permeability and on acyl chain ordering of soybean phosphatidylcholine bilayers. Proc. Natl. Acad. Sci;88: 6926-6930.

[1726] Schulman, B A, Carrano, A C, Jeffrey, P D, Bowen, Z, Kinnucan, E R, Finnin, M S, Elledge, S J, Harper, J W, Pagano, M, Pavletich, N P. 2000 Insights into SCF ubiquitin ligases from the structure of the Skp1-Skp2 complex. Nature;408:381-386.

[1727] Schultz, J, Copley, R R, Doerks, T, Ponting, C P, Bork, P. 2000 SMART: a web-based tool for the study of genetically mobile domains. Nucleic Acids Res;28:231-234.

[1728] Schultz, T F, Medina, J, Hill, A, Quatrano, R S. 1998 14-3-3 proteins are part of an abscisic acid-VIVIPAROUS1 (VP1) response complex in the Em promoter and interact with VP1 and EmBP1. Plant Cell;10:837-847.

[1729] Schumacher, K, Chory, J. 2000 Brassinosteroid signal transduction: still casting the actors. Curr. Opin. Plant Biol;3:79-84.

[1730] Schuinemann, D, Borchert, S, Fluigge, U I, Heldt, H W. 1993 ATP/ADP translocator from pea root plastids. Comparison with translocators from spinach chloroplasts and pea leaf mitochondria. Plant Physiol;103:131-137.

[1731] Schwacke, R., Grallath, S., Breitkreuz, K. E., Stransky, E., Stransky, H., Frommer, W. B., Rentsch, D., LeProT1, a transporter for proline, glycine betaine, and gamma-amino butyric acid in tomato pollen. Plant Cell (1999), March 11(3):377-392.

[1732] Schwartz, S H, Tan, B C, Gage, D A, Zeevaart, J A, McCarty, D R. 1997 Specific oxidative cleavage of carotenoids by VP14 of maize. Science;276(5320):1872-1874.

[1733] Schwechheimer, C, Deng, X W. 2000 The COP/DET/FUS proteins-regulators of eukaryotic growth and development. Semin Cell Dev Biol;11:495-503.

[1734] Schwechheimer, C, Serino, G, Callis, J, Crosby, W L, Lyapina, S, Deshaies, R J, Gray, W M, Estelle, M, Deng, X W. 2001 Interactions of the COP9 signalosome with the E3 ubiquitin ligase SCFTIRI in mediating auxin response. Science;292:1379-1382.

[1735] Schweizer, D B, Buchala, A, and Metraux, J P. 1997 Gene expression patterns and levels of jasmonic acid in rice treated with the resistance inducer 2,6-dichloro isonicotinic acid. Plant Physiol;115:61-70.

[1736] Searfoss, A M, Wickner, R B. 2000 3′ poly(A) is dispensable for translation. Proc Natl Acad Sci USA;97:9133-9137.

[1737] Sehnke, P C, Chung, H J, Wu, K, Ferl, R J. 2001 Regulation of starch accumulation by granule-associated plant 14-3-3 proteins. Proc Natl Acad Sci USA;98:765-770.

[1738] Sentoku, N, Sato, Y, Matsuoka, M. 2000 Overexpression of rice OSH genes induces ectopic shoots on leaf sheaths of transgenic rice plants. Dev Biol;220:358-364.

[1739] Seo, S, Sano, H, and Ohashi, Y. 1997 Jasmonic acid in wound signal transduction pathways. Physiol. Plant;101:740-745.

[1740] Seymour, R S. 1997 Plant That Warm Themselves. Sci. Amer;276:104-105.

[1741] Shakya, R, Sturm, A. 1998 Characterization of source- and sink-specific sucrose/H⁺ symporters from carrot. Plant Physiol;118:1473-1480.

[1742] Shalev, G, Sitrit, Y, Avivi-Ragolski, N, Lichtenstein, C, Levy, A A. 1999 Stimulation of homologous recombination in plants by expression of the bacterial resolvase ruvC. Proc Natl Acad Sci USA;96:7398-7402.

[1743] Shank K J, Su P, Brglez I, Boss W F, Dewey R E, Boston R S. 2001 Induction of lipid metabolic enzymes during the endoplasmic reticulum stress response in plants. Plant Physiol;126(1):267-277.

[1744] Sharkey, T D, Vassey, T L, Vanderveer, P J, Vierstra, R D. 1991 Carbon metabolism enzymes and photosynthesis in trangenic tobacco (Nicotiana tabacum L.) having excess phytochrome. Planta;185:287-296.

[1745] Shaw, R J, Wilson, J L, Smith, K T, Reines, D. 2001 Regulation of an IMP dehydrogenase gene and its overexpression in drug-sensitive transcription elongation mutants of yeast. J Biol Chem; 276(35)32905-32916.

[1746] Shaw, R H. 1983 Estimates of yield reductions in corn caused by water and temperature stress. In CD Ruper, P J Kramer, eds, Crop Relations to Water and Temperature Stress in Humid Temperate Climates. Westview Press, Boulder, CO 49-66.

[1747] Shaw, R H. 1988 Climate Requirements. In: Corn and corn improvement Spragure G F, Dudley J W eds. Pg 609-638.

[1748] Sheen, J, Hwang, S, Niwa, Y, Kobayashi, H, Galvraith, D W. Green-fluorescent protein as a new vital marker in plant cells. Plant J 1995 Nov;8(5):777-784.

[1749] Shelp, B J, Bown, A W, McLean, M D. 1999 Metabolism and functions of y-aminobutyric acid. Trends Plant Sci;41 :446-452.

[1750] Shen, B, Zheng, Z, Dooner, H K. 2000 A maize sesquiterpene cyclase gene induced by insect herbivory and volicitin: characterization of wild-type and mutant alleles. Proc Natl Acad Sci USA December 19;97(26):14807-14812.

[1751] Shen E C, Henry M F, Weiss V H, Valentini S R, Silver P A, Lee M S. 1998 Arginine methylation facilitates the nuclear export of hnRNP proteins. Genes Dev. 12:679-91.

[1752] Sheridan, W F, Clark, J K. 1993 Mutational analysis of morphogenesis of the maize embryo. Plant J;3:347-358.

[1753] Shi, X P, Yin, K C, Waxman, L. 1997 Effects of inhibitors of RNA and protein synthesis on the subcellular distribution of the eukaryotic translation initiation factor, eIF-5A, and the HIV-1 Rev protein. Biol Signals;6:143-149.

[1754] Shiba, T, Mizote, H, Kaneko, T, Nakajima, T, Kakimoto, Y. 1971 Hypusine, a new amino acid occurring in bovine brain. Isolation and structural determination. Biochim Biophys Acta;244:523-531.

[1755] Shibamoto, T, Hagiwara, Y, Hagiwara, H, Osawa, T. 1994 Flavonoid with strong antioxidative activity isolated from young barley leaves. Am. Chem. Soc Symp. Ser;547:153-163.

[1756] Shikanai, T, Takeda, T, Yamauch,i H, Sano, S, Tomizawa, K I, Yokota, A, Shigeoka, S. 1998 Inhibition of ascorbate peroxidase under oxidative stress in tobacco having bacterial catalase in chloroplasts. FEBS Lett;428:47-51.

[1757] Shinohara, A, Ogawa, T. 1999 Rad51/RecA protein families and the associated proteins in eukaryotes. Mutat Res; 435:13-21.

[1758] Shinomura, T, Uchida, K, Furuya, M. 2000 Elementary processes of photoperception by phytochrome A for high-irradiance response of hypocotyl elongation in Arabidopsis. Plant Physiol;122:147-156.

[1759] Shinozaki, K., and Yamaguchi-Shinozaki, K. 1997 Gene expression and signal transduction in water-stress response. Plant Physiol;115:327-334.

[1760] Shinozaki, K., Yamaguchi-Shinozaki, K. 2000 Molecular responses to dehydration and low temperature: differences and cross-talk between two stress signaling pathways. Curr. Opin. Plant Biol;3 :217-223.

[1761] Shirley, B W, Kubasek, W L, Storz, G, Bruggemann, E, Kepperneef, M, Ausubel, F M, Goodman, H M. 1995. Analysis of Arabidopsis mutants deficient in flavonoid biosynthesis. The Plant Journal;8(5):659-671.

[1762] Siedow, J N, Bickett, D M. 1981 Structural features required for inhibition of cyanide-insensitive electron transfer by propyl galate. Arch. Biochem. Biophys;207:32-39.

[1763] Siedow, J N, Umbach, A L, Moore, A L. 1995 The active site of the cyanide resistant oxidase from plant mitochondria contains a binuclear iron center. FEBS Lett;362:10-14.

[1764] Siedow, J N, Umbach, A L. 1995 Plant mitochondrial electron transfer and molecular biology. Plant Cell;7:821-831.

[1765] Siedow, J N, Whelan, J, Kearns, A, Wiskich, J T, Day, D A. 1992 Topology of the alternative oxidase in soybean mitochondria Molecular, Biochemical and Physiological Aspects of Plant Respiration (Amsterdam:Academic) pp. 19-27.

[1766] Silberstein, S, Collins, P G, Kellehe,r D J, Gilmore, R. 1995 The essential OST2 gene encodes the 16-kD subunit of the yeast oligosaccharyltransferase, a highly conserved protein expressed in diverse eukaryotic organisms. J Cell Biol;131:371-383.

[1767] Simons, B H, Millenaar, F F, Mulder, L, Van Loon, L C, Lambers, H. 1999 Enhanced expression and activation of the alternative oxidase during infection of Arabidopsis with Pseudomonal syringae pv tomato. Plant Physiol;120:529-538.

[1768] Singh, J, Nakamura, S, Ota, Y. 1993 Effect of epibrassinolide on gram (Cicer arietinum) plants grown under water stress in the juvenile stage. Indian J. Agric. Sci;63:395-397.

[1769] Sinha, N R, Williams, R E, Hake, S. 1993 Overexpression of the maize homeo box gene, KNOTTED-1, causes a switch from determinate to indeterminate cell fates. Genes Dev;7:787-795.

[1770] Sivamani, E, Bahieldinl, A, Wraith, J M, Al-Niemi, T, Dye, W E, Ho, T D, Qu, R. 2000 Improved biomass productivity and water use efficiency under water deficit conditions in transgenic wheat constitutively expressing the barley HVA1 gene. Plant Sci;155:1-9.

[1771] Sjolund, R D. 1997 The phloem sieve element: A river runs through it. Plant Cell;9:1137-1146.

[1772] Smith, F W, Ealing, P M, Dong, B, Delhaize, E. 1997 The cloning of two Arabidopsis genes belonging to a phosphate transporter family. Plant J;11: 83-92.

[1773] Snedden W. A. and Blumwald E. 2000 Alternative splicing of a novel diacylglycerol kinase in tomato leads to a calmodulin-binding isoform. Plant J;24:317-326.

[1774] Snedden, W A, Koutsia, N, Baum, G, Fromm, H. 1996 Activation of a petunia glutamate decarboxylase by calcium/calmodulin or by a monoclonal antibody which recognizes the calmodulin binding domain. J Biol Chem;271;4148-4153.

[1775] Snyder, B A, Nicholson, R L. 1990 Synthesis of phytoalexins in sorghum as a site specific response to fungal ingress. Science;248:1637.

[1776] Somers, D E, Schultz, T F, Milnamow, M, Kay, S A. 2000 ZEITLUPE encodes a novel clock-associated PAS protein from Arabidopsis. Cell;101:319-329.

[1777] Somerville, C. Direct tests of the role of membrane lipid composition in low-temperature-induced photoinhibition and chilling sensitivity in plants and cyanobacteria. Proc Natl Acad Sci USA Jul. 3, 1995; 92(14):6219-6225.

[1778] Somssich, I. E et al, 1989: Differential early activation of defense-related genes in elicitor-treated parsley cells. Plant Mol Biol;12:227-234.

[1779] Sonenberg, N, Newgard, C B. 2001 Protein synthesis. The perks of balancing glucose. Science;293(5531):818-819.

[1780] Sonoda, E, Sasaki, M S, Morrison, C, Yamaguchi-Iwai, Y, Takata, M, Takeda, S. 1999 Sister chromatid exchanges are mediated by homologous recombination in vertebrate cells. Mol Cell Biol;19:5166-5169.

[1781] Sowa, A W, Duff, S M G, Guy, P A, Hill, R D. 1998 Altering hemoglobin levels changes energy status in maize cells under hypoxia. Proc. Natl. Acad. Sci. USA;95:10317-10321.

[1782] Spear E, Ng D T. 2001 The unfolded protein response: no longer just a special teams player. Traffic;2(8):515-523.

[1783] Spencer, T M, O'Brien, J V, Start, W G, Adams, T R, Gordon-Kamm, W J, Lemaux, P G. Segregation of transgenes in maize. Plant Molecular Biology 1992;18:201-210.

[1784] Sperling, U, van Cleve, B, Frick, G, Apel, K, Armstrong, G A. 1997 Overexpression of light-dependent PORA or PORB in plants depleted of endogenous POR by far-red light enhances seedling survival in white light and protects against photooxidative damage. Plant J;12:649-658.

[1785] Stacey, M G, Kopp, O R, Kim, T H, von Arnim, A G. 2000 Modular domain structure of Arabidopsis COP1. Reconstitution of activity by fragment complementation and mutational analysis of a nuclear localization signal in planta. Plant Physiol;124:979-990.

[1786] Stacy, R A, Aalen, R B. 1998 Identification of sequence homology between the internal hydrophilic repeated motifs of group 1 late-embryogenesis-abundant proteins in plants and hydrophilic repeats of the general stress protein GsiB of Bacillus subtilis. Planta; 1998 206:476-478.

[1787] Stadler, R, Brandner, J, Schulz, A, Gahrtz, M, Sauer, N. 1995 Phloem loading by the PmSUC2 sucrose carrier from Plantago major occurs into companion cells. Plant Cell;7:1545-1554.

[1788] Stadler, R, Sauer, N. 1996 The Arabidopsis thaliana AtSUC2 gene is specifically expressed in companion cells. Bot. Acta; 109:299-308.

[1789] Stalker, D M, Malyj, L D, McBride, K E. Purification and properties of a nitrilase specific for the herbicide bromoxynil and corresponding nucleotide sequence analysis of the bxn gene. J Biol Chem May 5, 1988; 263(13):6310-6314.

[1790] Staswick, P E, Yuen, G Y, and Lehman, C C. 1998 Jasmonate signaling mutants of Arabidopsis are susceptible to the soil fungus Pythium irregulare. Plant J;15:747-754.

[1791] Steindler, C, Matteucci, A, Sessa, G, Weimar, T, Ohgishi, M, Aoyama, T, Morelli, G, Ruberti, I. 1999 Shade avoidance responses are mediated by the ATHB-2 HD-zip protein, a negative regulator of gene expression. Development;126:4235-4245.

[1792] Steitz, J A, Berg. C, Hendrick, J P, La Branche-Chabot, H, Metspalu, A, Rinke, J, and Yario, T. (1988) A 5S rRNA/L5 complex is a precursor to ribosome assembly in mammalian cells. J. Cell Biol;106.545-556.

[1793] Stemler, A J. 1997 The case of chloroplast thylakoid carbonic anhydrase. Physiol. Plantarum;99:348-353.

[1794] Steudle, E, and Henzler, T. 1995. Water channels in plants: do basic concepts of water transport change? Journal of Experimental Botany;46(290):1067-1076.

[1795] Stormo, G D. Gene-finding approaches for eukaryotes. Gene Res April 2000;10(4):394-397.

[1796] Subbaiah, C C, Bush, D S, Sacks, M M 1998 Mitochondrial contribution to the anoxic Ca2+ signal in maize suspension-cultured cells. Plant Physiol;118:759-771.

[1797] Subbaiah, C C, Sachs, M M. 2000 Maize cap1 encodes a novel SERCA-type calcium-ATPase with a calmodulin-binding domain. J.Bio.Chem;275 :21678-21687.

[1798] Sugano, S., Andronis, C., Green, R. M., Wang, Z -H. and Tobin, E. M.1998. Proc. Natl. Acad Sci. USA;95:11020-11025.

[1799] Sugano, S., Andronis, C., Ong, M. S., Green, R. M. and Tobin, E. M 1999. Proc. Natl. Acad Sci. USA;96:12362-12366.

[1800] Sugimoto, A, Hozak, R R, Nakashima, T, Nishimoto, T, Rothman, J H. 1995 dad-1, an endogenous programmed cell death suppressor in Caenorhabditis elegans and vertebrates. EMBO J;14:4434-4441.

[1801] Sugiyama, T, New, J H, Kowalczykowski, S C. 1998 DNA annealing by RAD52 protein is stimulated by specific interaction with the complex of replication protein A and single-stranded DNA. Proc Natl Acad Sci USA;95:6049-6054.

[1802] Sung han park, Su Hyun Park, Hang Gyeong Chin, Moo Je Cho, Robert A. Martienssen, and Chang-deok Han 2000 Inhibitor of striate conditionally suppresses cell proliferation in variegated maize. Genes and Development;14:1005-1016.

[1803] Sung, P, Trujillo, K M, Van Komen, S. 2000 Recombination factors of Saccharomyces cerevisiae. Mutat Res;451 :257-275.

[1804] Sutcliffe, J G. Nucleotide sequence of the ampicillin resistance gene of Escherichia coli plasmid pBR322. Proc Natl Acad Sci USA August 1978;75(8):3737-3741.

[1805] Swire-Clark, G A, Marcotte, W R. 1999 The wheat LEA protein Em functions as an osmoprotective molecule in Saccharomyces cerevisiae. Plant Mol Biol;39:117-128.

[1806] Synetos, D, Frantziou, C P, Alksne, L E. 1996 Mutations in yeast ribosomal proteins S28 and S4 affect the accuracy of translation and alter the sensitivity of the ribosomes to paromomycin. Biochim Biophys Acta;1309:156-166.

[1807] Szczegielniak, J, Liwosz, A, Jurkowski, I, Loog, M, Dobrowolska, G Y, E k, P, Harmon, A C, Muszynska, G. 2000 Calcium dependent protein kinase from maize seedlings activated by phospholipids. Eur. J. Biochem;267:3818-3827.

[1808] Sze, H, Li, X, Palmgren, M G. 1999 Energization of plant cell membranes by H+-pumping ATPases:regulation and biosynthesis. Plant Cell;11:677-689.

[1809] Ta, C T, Weiland, R T. Nitrogen partitioning in maize during ear development. Crop Science March-April1992:32(2):443-451.

[1810] Tacke, E, Korfhage, C, Michel, D, Maddaloni, M, Motto, M, Lanzini, S, Salamini, F, Doring, H P. Transposon tagging of the maize Glossy2 locus with the transposable element En/Spm. Plant J. December 1995;8(6):907-17. PMID: 8580961; UI: 96132147.

[1811] Takahashi, R, Deveraux, Q, Tamm, I, Welsh, K, Assa-Munt, N, Salvesen, G S, Reed, J C. 1998 A single BIR domain of XIAP sufficient for inhibiting caspases. J Biol Chem;273:7787-7790.

[1812] Takahashi, M, Nakanishi, H., Kawasaki, S, Nishizawa, N K, Mori, S. Enhanced tolerance of rice to low iron availability in alkaine soils using barley nicotianamine aminotransferase genes. Nature Biotechnology, 2001;19:466-469.

[1813] Takahashi, M, Yamaguchi, H, Nakanishi, H, Shioiri, T, Nishizawa, N, Mori, S. Cloning two genes for nicotianamine aminotransferase, a critical enzyme in iron acquisition (Strategy II) in graminaceous plants. Plant Physiol 1999; 121:947-956.

[1814] Takahashi, Y., Shomura, A., Sasaki, T. and Yano, M. 2001 Hd6, a rice quantitative trait locus involved in photoperiod sensitivity, encodes the alpha subunit of protein kinase CK2. Proc. Natl. Acad Sci. USA;98:7922-7927.

[1815] Takano, M, Kanegae, H, Shinomura, T, Miyao, A, Hirochika, H, Furuya, M. 2001 Isolation and characterization of rice phytochrome A mutants. Plant Cell; 13:521-534.

[1816] Takayama, S, Shiba, H, Iwano, M, Shimosato, H, Che, F S, Kai, N, Watanabe, M, Suzuki, G, Hinata, K, Isogai, A. 2000 The pollen determinant of self-incompatibility in Brassica campestris. Proc Natl Acad Sci USA; 97:1920-1925.

[1817] Takeuchi, Y, Ogasawara, M, Konnai, M, Takematsu, T. 1992 Application of brassinosteroids in agriculture in Japan. Proc. Plant Growth Regul. Soc. Am; 19:343-352.

[1818] Tan, S and Troxler, R. 1999 Characterization of two chloroplast RNA polymerase sigma factors from Zea mays: Photoregulation and differential expression. PNAS (USA); 96 :5316-5321.

[1819] Tanaka, H, Masuta, C, Uehara, K, Kataoka, J, Koiwai, A, Noma, M. 1997 Morphological changes and hypomethylation of DNA in transgenic tobacco expressing antisense RNA of the S-adenosyl-L-homocysteine hydrolase gene. Plant Mol Biol; 35:981-986.

[1820] Tanaka, Y, Makishima, T, Sasabe, M, Ichinose, Y, Shiraishi, T, Nishimoto, T, Yamada, T. 1997 dad-1, A putative programmed cell death suppressor gene in rice. Plant Cell Physiol;38:379-383.

[1821] Tanaka, A, Ito, H, Tanaka, R, Tanaka, N K. Chlorophyll a oxygenase (CAO) is involved in chlorophyll b formation from chlorophyll a. Proc. Natl.Acad.Sci USA Oct. 13, 1998; 95(21):12719-12723.

[1822] Tanaka, H, Masuta, C, Uehara, K, Kataoka, J, Koiwai, A, Noma, M. Morphological changes and hypomethylation of DNA in transgenic tobacco expressing antisense RNA of the S-adenosyl-L-homocysteine hydrolase gene. Plant Mol Biol December 1997;35(6):981-986.

[1823] Tanaka, N, Ogura, T, Noguchi, T, Hirano, H, Yabe, N, Hasunuma, K. 1998 Phytochrome-mediated light signals are transduced to nucleoside diphosphate kinase in Pisum sativum L. cv. Alaska. J Photochem Photobiol B; 45:113-121.

[1824] Tantikanjana, T, Yong, J. W. H., Letham, D. S., Griffith, M., Hussain, M., Ljung, K, Sandberg, G., and Sundaresan, V. 2001. Control of axillary bud initiation and shoot architecture in Arabidopsis through the SUPERSHOOT gene. Genes and Dev;15:1577-1588.

[1825] Tao, Y, Kassatly, R F, Cress, W D, Horowitz, J M. 1997 Subunit composition determines E2F DNA-binding site specificity. Mol Cell Biol;17:6994-7007.

[1826] Tavernier, E, Pugin, A. 1995 Transbilayer distribution of phosphathidylcholine and phosphathidylethanolamine in vacuolar membrane of Acer pseudoplatanus cells. Biochimie;77: 174-181.

[1827] Taylor, S, Hofer, J, Murfet, 1. 2001 Stamina pistilloida, the Pea Ortholog of Fim and UFO, Is Required for Normal Development of Flowers, Inflorescences, and Leaves. Plant Cell; 13:31-46.

[1828] Telfer, A, Dhami, S, Bishop, S M, Phillips, D, Barber, J. 1994 Beta-Carotene quenches singlet oxygen formed by isolated photosystem II reaction centers. Biochemistry;33:14469-14474.

[1829] Tenkouano, A, Miller, F R, Hart, G E, Frederiksen, R A, Nicholson, R. L 1993 Phytoalexin assay in juvenile Sorghum: An aid to breeding for anthracnose resistance. Crop Science;33:243-248.

[1830] Tepperman, J M, Zhu, T, Chang, H S, Wang, X, Quail, P H. 2001 Multiple transcription-factor genes are early targets of phytochrome A signaling. Proc Natl Acad Sci USA;98:9437-9442.

[1831] Tevini, M, Braun, J, Fieser, G. 1991 The protective function of the epidermal layer of rye seedlings against ultraviolet-B radiation. Photochem. and Photobiol;53:329-333.

[1832] Theodoulou, F L. 2000. Plant ABC transporters. Biochem. Biophys. Acta; 1465(1-2):79-103.

[1833] Thiele, A, Herold, M, Lenk, I, Quail, P H, Gatz, C. 1999 Heterologous expression of Arabidopsis phytochrome B in transgenic potato influences photosynthetic performance and tuber development. Plant Physiol; 120:73-82.

[1834] Thillet, J, Absil, J, Stone, S R, Pictet, R. Site-directed mutagenesis of mouse dihydrofolate reductase. Mutants with increased resistance to methotrexate and trimethoprim. J Biol Chem Sep. 5, 1988;263(25):12500-12508.

[1835] Thomas, C, Sun, Y, Naus, K, Lloyd, A, Roux, S. 1999 Apyrase Functions in Plant Phosphate Nutrition and Mobilizes Phosphate from Extracellular ATP. Plant Physiol;119:543-552.

[1836] Thomas, D J, Avenson, T J, Thomas, J B, Herbert, S K. 1998 A cyanobacterium lacking iron superoxide dismutase is sensitized to oxidative stress induced with methyl viologen but Is not sensitized to oxidative stress induced with norflurazon. Plant Physiol;116:1593-1602.

[1837] Thomas, D J, Thomas, J B, Prier, S D, Nasso, N E, Herbert, S K. 1999 Iron superoxide dismutase protects against chilling damage in the cyanobacterium synechococcus species PCC7942. Plant Physiol;120:275-282.

[1838] Thomas, S G, Phillips, A L, Hedden, P. Molecular cloning and functional expression of gibberellin 2-oxidases, multifunctional enzymes involved in gibberellin deactivation. Proc. Natl. Acad. Sci USA Apr. 13, 1999;96(8):4698-4703.

[1839] Thompson, C K, Movva, N R, Tizard, R, Crameri, R, Davies, J E, Lauwereys, M, Botterman, J. EMBO J 1987;6:2519-2623.

[1840] Thompson, J F, Stewart, C R, Morris, C J. 1966 Changes in amino acid content of excised leaves during incubation. I. The effect of water content of leaves and atmospheric oxygen level. Plant Physiol;41:1578-1582.

[1841] Thorsness, P E, White, K H, Fox T D. Inactivation of YME1, a member of the ftsH-SEC18-PAS 1-CDC48 family of putative ATPase-encoding genes, causes increased escape of DNA from mitochondria in Saccharomyces cerevisiae. Mol Cell Biol September 1993; 13(9):5418-5426.

[1842] Tian, Lining, Sequin, Armand, Charest. Expression of the green fluorescent protein gene in conifer tissues. Plant Cell Reports 1997;16(5):267-271.

[1843] Timmermans, M C, Hudson, A, Becraft, P W, Nelson, T. 1999 ROUGH SHEATH2: a Myb protein that represses knox homeobox genes in maize lateral organ primordia. Science;284: 151-153.

[1844] Timmermans, M C, Maliga, P, Vieira, J, Messing, J. The pFF plasmids: cassettes utilising CaMV sequences for expression of foreign genes in plants. J Biotechnol June 1990;14(3-4):333-344.

[1845] Tinland, B, Schoumacher, F, Gloeckler, V, Bravo-Angel, A M, Hohn, B. The Agrobacterium tumefaciens virulence D2 protein is responsible for precise integration of T-DNA into plant genome. EMBO Jounral 1995;14(14):3585-3595.

[1846] Tjaden, J, Mohlmann, T, Kampfenkel, K, Henrichs, G, Neuhaus, H E. (1998) Altered plastidic ATP/ADP-transporter activity influences potato (Solanum tuberosum) morphology, amount and composition of tuber starch, and tuber morphology. Plant J; 16:531-540.

[1847] Tjaden, J, Schwoppe, C, Mohlmann, T, Neuhaus, H E. 1998 Expression of the plastidic ATP/ADP transporter gene in Escherichia coli lead to the presence of a functional adenine nucleotide transport system in the bacterial cytoplasmic membrane. J. Biol. Chem;273:9630-9636.

[1848] Toh-E, A, Guerry, P, Wickner, R B. 1978 Chromosomal superkiller mutants of Saccharomyces cerevisiae. J Bacteriol;136:1002-1007.

[1849] Toh-E, A, Wickner, R B. 1980 “Superkiller” mutations suppress chromosomal mutations affecting double-stranded RNA killer plasmid replication in Saccharomyces cerevisiae. Proc Natl Acad Sci USA;77:527-530.

[1850] Tome, M E, Fiser, S M, Payne, C M, Gerne,r E W. 1997 Excess putrescine accumulation inhibits the formation of modified eukaryotic initiation factor 5A (eIF-5A) and induces apoptosis. Biochem J;328:847-854.

[1851] Tome, M E, Gerner, E W. 1996 Hypusine modification in eukaryotic initiation factor 5A in rodent cells selected for resistance to growth inhibition by ornithine decarboxylase-inhibiting drugs. Biochem J;320:55-60.

[1852] Tomitani, A, Okada, K, Miyashita, H, Matthijs, H C, Ohno, T, Tanada, A. Chlorophyll b and phycobilins in the common ancestor of cyanobacteria and chloroplasts. Nature July 8, 1999; 400(6740):159-162.

[1853] Tongaonkar, P, Chen, L, Lambertson, D, Ko, B, Madura, K. 2000 Evidence for an interaction between ubiquitin-conjugating enzymes and the 26S proteasome. Mol CellBiol; 20:4691-4698.

[1854] Topham, M. K. and Prescott, S. M. 1999 Mammalian diacylglycerol kinases, a family of lipid kinases with signaling functions. J. Biol. Chem;274:11447-11450.

[1855] Topham, M. K., Bunting, M., Zimmerman, G. A. McIntyre, T. M. Blackshear, P. J. and Prescott, S. M. (1998) Protein kinase C regulates the nuclear localization of diacylglycerol kinase-zeta. Nature;394:697-700.

[1856] Torii, K U, Mitsukawa, N, Oosumi, T, Matsuura, Y, Yokoyama, R, Whittier, R F, Komeda, Y. 1996 The Arabidopsis ERECTA gene encodes a putative receptor protein kinase with extracellular leucine-rich repeats. Plant Cell;8:735-746.

[1857] Toroser, D, Athwal, G S, Huber, S C. 1998 Site-specific regulatory interaction between spinach leaf sucrose-phosphate synthase and 14-3-3 proteins. FEBS Lett;435:110-114.

[1858] Toyn, J H, Araki, H, Sugino, A,. Johnston, L H. 1991 The cell-cycle-regulated budding yeast gene DBF2, encoding a putative protein kinase, has a homologue that is not under cell cycle control. Gene;104:63-70.

[1859] Tozawa et. al. 1998 Nuclear encoding of a plastid a factor in rice and its tissue- and light-dependent expression. Nucleic Acid Res; 26:415-419.

[1860] Travers, K J, Patil, C K, Wodicka, L, Lockhart, D J, Weissman, J S, Walter, P. 2000 Functional and genomic analyses reveal an essential coordination between the unfolded protein response and ER-associated degradation. Cell;101(3):249-58.

[1861] Tripp, M L, Bouchard, R A, Pinon, R. 1989 Cloning and characterization of NSP1, a locus encoding a component of a CDC25-dependent, nutrient-responsive pathway in Saccharomyces cerevisiae. Mol Microbiol;3:1319-1327.

[1862] Trotochaud, A E, Jeong, S, Clark, S E. 2000 CLAVATA3, a multimeric ligand for the CLAVATA1 receptor-kinase. Science;289:613-617.

[1863] Truernit, E, Sauer, N. 1995 The promoter of the Arabidopsis thaliana SUC2 sucrose-H⁺ symporter gene directs expression of β-glucuronidase to the phloem: Evidence for phloem loading and unloading by SUC2. Planta;196:564-570.

[1864] Trull, M C, Deikman, J. An Arabidopsis mutant missing one acid phosphatase isoform. Planta November 1998;206(4):544-550.

[1865] Tsiantis, M, Schneeberger, R, Golz, J F, Freeling, M, Langdale, J A. The maize rough sheath2 gene and leaf development programs in monocot and dicot plants. Science 1999;284:154-156.

[1866] Tsonev, T D, Lazova, G N, Stoinova, Z G, Popova, L P. A Possible Role for Jasmonic Acid Adaptation of Barley Seedlings to Salinity Stress. J. Plant Growth Regul. 1998 Summer;17(3):153-159.

[1867] Tsuge, T, Inagaki, N, Yoshizumi, T, Shimada, H, Kawamoto, T, Matsuki, R, Yamamoto, N, Matsui, M. 2001 Phytochrome-mediated control of COP1 gene expression in rice plants. Mol Genet Genomics;265:43-50.

[1868] Tubbe, A, Buckhout, T J. 1992 In vitro analysis of the H⁺-hexose symporter on the plasma membrane of sugarbeets (Beta vulgaris L.). Plant Physiol;99:945-951.

[1869] Turano, F J, Fang, T K. 1998 Characterization of two glutamate decarboxylase cDNA clones from Arabidopsis thaliana. Plant Physiol;117:1411-1421.

[1870] Turlings, T C, Fritzsche, M E. 1999 Attraction of parasitic wasps by caterpillar-damaged plants. Novartis Found Symp. 1999;223:21-32.

[1871] Turlings, T C J, Scheepmaker, J W A, Vet, L E M, Tumlinson, J H. & Lewis, W J J. How contact foraging experiences affect preferences for host-related odors in the larval parasitoid Cotesia marginiventris (Cresson) (Hymenopters: Braconidae). J Chemical Ecology May 1990; 16(5):1577-1589.

[1872] Ueguchi-Tanaka, M, Fujisawa, Y, Kobayashi, M, Ashikari, M, Iwasaki, Y, Kitano, H, Matsuoka, M. 2000 Rice dwarf mutant d1, which is defective in the alpha subunit of the heterotrimeric G protein, affects gibberellin signal transduction. Proc Natl Acad Sci USA;97:11638-11643.

[1873] Ugaki, M, Ueda, T, Timmermans, M C, Vieira, J, Elliston, K O, Messing, J. Replication of a geminivirus derived shuttle vector in maize endosperm cells. Nucl Acids Res 1991;19:371-377.

[1874] Umbach, A L, Siedow, J N. 1993 Covalent and noncovalent dimers of the cyanide-resistant alternative oxidase protein in higher plant mitochondria and their relationship to enzyme activity. Plant Physiol;103:845-854.

[1875] Umeda, M, Bhalerao, R P, Schell, J, Uchimiya, H, Koncz, C. 1998 A distinct cyclin-dependent kinase-activating kinase of Arabidopsis thaliana. Proc Natl Acad Sci USA;95:5021-5026.

[1876] Umeda, M, Umeda-Hara, C, Yamaguchi, M, Hashimoto, J, Uchimiya, H. 1999 Differential expression of genes for cyclin-dependent protein kinases in rice plants. Plant Physiol;119:31-40.

[1877] Urao, T B, Yakubov, R, Satoh, K, Yamaguchi-Shinozaki, M, Seki, T, Hirayama, and K. Shinozaki, A. Transmembrane Hybrid-Type Histidine Kinase in Arabidopsis Functions as an Osmosensor. The Plant Cell;11, 1999:1743-1754.

[1878] Uren, A G, Beilharz, T, O'Connell, M J, Bugg, S J, van Driel, R, Vaux, D L, Lithgow, T. 1999 Role for yeast inhibitor of apoptosis (IAP)-like proteins in cell division. Proc Natl Acad Sci USA; 96:10170-10175.

[1879] Uren, A G, O'Rourke, K, Aravind, L A, Pisabarro, M T, Seshagiri, S, Koonin, E V, Dixit, V M. 2000 Identification of paracaspases and metacaspases: two ancient families of caspase-like proteins, one of which plays a key role in MALT lymphoma. Mol Cell;6:96-97.

[1880] Vaarala, M H, Porvari, K, Kyllonen, A, Vihko, P. 2000 Differentially expressed genes in two LNCaP prostate cancer cell lines reflecting changes during prostate cancer progression. Lab Invest;80: 1259-1268.

[1881] Vaidyanathan, R, Kuruvilla, S, Thomas, G. 1999 Characterization and expression pattern of an abscisic acid and osmotic stress responsive gene from rice. Plant Science;140:21-30.

[1882] van Bel, A J E. 1993 Strategies of phloem loading. Annu. Rev. Plant Physiol. Plant Mol. Biol; 44:253-281.

[1883] Van Breusegem, F, Slooten, L, Stassart, J M, Moens, T, Botterman, J, Van Montagu, M, Inze, D. 1999 Overproduction of Arabidopsis thaliana FeSOD confers oxidative stress tolerance to transgenic maize. Plant Cell Physiol;40:515-523.

[1884] Van Camp, W, Capiau, K, Van Montagu, M, Inze, D, Slooten, L. 1996 Enhancement of oxidative stress tolerance in transgenic tobacco plants overproducing Fe-superoxide dismutase in chloroplasts. Plant Physiol;112:1703-1714.

[1885] van den Wijngaard P W, Bunney T D, Roobeek I, Schonknecht G, de Boer A H. 2000 Slow vacuolar channels from barley mesophyll cells are regulated by 14-3-3 proteins. FEBS Lett;488:100-104.

[1886] Van der Knaap, E, Kim, J H, Kende, H. 2000 A novel gibberellin-induced gene from rice and its potential regulatory role in stem growth. Plant Physiology;122:695-704.

[1887] Van Dyck, E, Stasiak, A Z, Stasiak, A, West, S C. 1999 Binding of double-strand breaks in DNA by human Rad52 protein. Nature;398:728-731.

[1888] van Heeswijk, W C, Wen, D, Clancy, P, Jaggi, R, Ollis, D L, Westerhoff, H V, Vasudevan, S G. 2000 The Escherichia coli signal transducers PII (GlnB) and GlNK form heterotrimers in vivo: fine tuning the nitrogen signal cascade. Proc Natl Acad Sci USA; 97(8):3942-3947.

[1889] van Heusden, G P, Griffiths, D J, Ford, J C, Chin-A-Woeng, T F, Schrader, P A, Carr, A M, Steensma, H Y. 1995 The 14-3-3 proteins encoded by the BMH1 and BMH2 genes are essential in the yeast Saccharomyces cerevisiae and can be replaced by a plant homologue. Eur J Biochem;229:45-53.

[1890] van Himbergen, J. A. J., ter Riet, B., Meijer, H. J. G., van den Ende, H., Musgrave, A., Munnik, T. 1999 Mastoparan analogues activate phospholipase C- and phospholipase D activity in Chlamydomonas: a comparative study. J. Exp. Bot;50:1735-1742.

[1891] van Hoof, A, Staples, R R, Baker, R E, Parker, R. 2000 Function of the ski4p (Csl4p) and ski7p proteins in 3′-to-5′ degradation of mRNA. Mol Cell Biol;20:8230-8243.

[1892] Vanlerberghe, G C, Day, D A, Wiskich, J T, Vanlerberghe, A E, McIntosh, L. 1995 Alternative oxidase activity in tobacco leaf mitochondria: dependence on tricarboxylic acid cycle-mediated redox regulation and pyruvate activation. Plant Physiol;109:353-361.

[1893] Vanlerberghe, G C, McIntosh, L. 1994 Mitochondrial electron transport regulation of nuclear gene expression: studies with the alternative gene of tobacco. Plant Physiol;105:867-874.

[1894] Vanlerberghe, G C, McIntosh, L. 1999 Signals regulating the expression of the nuclear gene encoding alternative oxidase of plant mitochondria. Plant Physiol;111:589-595.

[1895] Veena, Reddy, V S, Sopory, S K. 1999 Glyoxalase I from Brassicajuncea: molecular cloning, regulation and its over-expression confer tolerance in transgenic tobacco under stress. Plant J;17:385-395.

[1896] Venema, J, Tollervey, D. 1996 RRP5 is required for formation of both 18S and 5.8S rRNA in yeast. EMBO J;15:5701-15714.

[1897] Vercesi, A E, Martins, I S, Silva, M A P, Leite, H M F, Cuccovia, I M, Chaimovich, H. PUMPing plants. Nature May 4, 1995;375:24.

[1898] Vincent, A, Liebman, S W. 1992 The yeast omnipotent suppressor SUP46 encodes a ribosomal protein which is a functional and structural homolog of the Escherichia coli S4 ram protein. Genetics;132:375-386.

[1899] Vollbrecht, E, Veit, B, Sinha, N, Hake, S 1991 The developmental gene Knotted-1 is a member of a maize homeobox gene family. Nature;350:241-243.

[1900] Von Schaewen, A, Stitt, M, Schmidt, R, Sonnewald, U, Willmitzer, L. Expression of a yeast-derived invertase in the cell wall of tobacco and Arabidopsis plants leads to accumulation of carbohydrate and inhibition of photosynthesis and strongly influences growth and phenotype of transgenic tobacco plants. EMBO J October 1990;9(10):3033-3044.

[1901] Wagner, A M. 1995 A role for active oxygen species as second messengers in the induction of alternative oxidase gene expression in Petunia hybrida cells. FEBS Lett;368:339-342.

[1902] Wagner, A M, Moore, A L. 1997 Structure and function of the plant alternative oxidase: its putative role in the oxygen defence mechanism. Biosci. Rep;17:319-333.

[1903] Walker, A R, Davison, P A, Bolognesi-Winfield, A C, James, C M, Srinivasan, N, Blundell, T L, Esch, J J, Marks, M D, Gray, J C. (1999) The TRANSPARENT TESTA GLABRA1 locus, which regulates trichome differentiation and anthocyanin biosynthesis in Arabidopsis, encodes a WD40 repeat protein. Plant Cell;11:1337-50.

[1904] Wallace, W, Secor, J, Schrader, E 1984 Rapid accumulation of -aminobutyric acid and alanine in soybean leaves in response to an abrupt transfer to lower temperature, darkness or mechanical manipulation. Plant Physiol;75:170-175.

[1905] Walsh, J, Freeling, M. 1999 The liguleless2 gene of maize functions during the transition from the vegetative to the reproductive shoot apex. Plant J;19:489-495.

[1906] Wang, X Z, Harding, H P, Zhang, Y, Jolicoeur, E M, Kuroda, M, Ron, D. 1998 Cloning of mammalian Irel reveals diversity in the ER stress responses. EMBO J;17(19):5708-5717.

[1907] Wang, Z Y, Kenigsbuch, D, Sun, L, Harel, E, Ong, M S, Tobin, E M. 1997 A Myb-related transcription factor is involved in the phytochrome regulation of an Arabidopsis Lhcb gene. Plant Cell;9:491-507.

[1908] Wang et al., Molecular and Cellular Biology, August 1992, p. 3399-3406

[1909] Wang, B, Zeng, G. 1993 Effect of epibrassinolide on the resistance of rice seedlings to chilling injury. Zhiwu Shengli Xuebao,19:53-60.

[1910] Wang, C Y, Buta, J G 1994 Methyl jasmonate reduces chilling injury in Cucurbita pepo through its regulation of abscisic acid and polyamine levels. Environ Exp Bot;34:427-432.

[1911] Wang, J, Zhang, H, Allen, R D. 1999 Overexpression of an Arabidopsis peroxisomal ascorbate peroxidase gene in tobacco increases protection against oxidative stress. Plant Cell Physiol;40:725-732.

[1912] Wang, N, Yan, K, Rasenick, M M. 1990 Tubulin binds specifically to the signal-transducing proteins, Gs alpha and Gi alpha 1. J Biol Chem;265:1239-1242.

[1913] Wang, Z Y, Seto, H, Fujioka, S, Yoshida, S, Chory, J. 2001 BRI1 is a critical component of a plasma-membrane receptor for plant steroids. Nature. 2001;410:380-383.

[1914] Ward, J, Kuhn, C, Tegeder, M, and Frommer, W B. 1998 Sucrose transport in plants. Int. Rev. Cytol;178:41-71.

[1915] Wardrop, A J, Wicks, R E, Entsch, B. Occurrence and expression of members of the ferritin gene family in cowpeas. Biochemical Journal Feb. 1, 1999;337(pt.3):523-530.

[1916] Warren, M J, Bolt, E L; Rossner, C A; Scott, A I; Spenser, J B; Woodcock, S C. Gene dissection demonstrates that the Escherichia coli cysG gene encodes a multifunctional protein. BioChemical Journal 1994;302(Pt 3):837-844.

[1917] Wasternack, C, Parthier, B. 1997 Jasmonate signalled plant gene expression. Trends Plant Sci;3:302-307.

[1918] Watanabe, T, Sakai, S. 1998 Effects of active oxygen species and methyl j asmonate on expression of the gene for a wound-inducible 1-aminocyclopropane-1-carboxylate synthase in winter squash (Cucurbita maxima). Planta;206:570-576.

[1919] Weaver et al. A comparison of the expression patterns of several senescence-associated genes in response to stress and hormone treatment. Plant Mol Biol. 1998,37:455-469

[1920] Weber, E J. 1987 Lipids of the Kernel. Pages 311-349 in: Corn: Chemistry and Technology. Watson and Ramstad ed. Am. Assoc. of Cereal Chem, Inc., St. Paul, Minn.

[1921] Weber, H, Borisjuk, L, Heim, U, Sauer, N, Wobus, U. 1997 A role for sugar transporters during seed development: Molecular characterization of a hexose and a sucrose carrier in fava bean seeds. Plant Cell;9:895-908.

[1922] Weber, K L, Bolander, M E, Sarkab, G. Rapid acquisition of unknown DNA sequence adjacent to a known segment by multiplex restriction site PCR. Biotechniques Sep. 1998;25(3):415-419.

[1923] Wegrzyn T et al. 2000 A novel alpha amylase gene is transiently upregulated during low temperature exposure in apple fruit. Eur. J. Biochem;267:1313.

[1924] Weige, I D, Alvarez, J, Smyth, D R, Yanofsky, M F, Meyerowitz, E M. 1992 LEAFY controls floral meristem identity in Arabidopsis. Cell;69:843-859.

[1925] Weise, A, Barker, L, Kuhn, C, Lalonde, S, Buschmann, H, Frommer, W, Ward, J, 2000 A New Subfamily of Sucrose Transporters, SUT4, with Low Affinity/High Capacity Localized in Enucleate Sieve Elements of Plants. Plant Cell;12:1345-1355.

[1926] Weiss, C A, Huang, H, Ma, H. 1993 Immunolocalization of the G protein alpha subunit encoded by the GPA1 gene in Arabidopsis. Plant Cell;5:1513-1528.

[1927] Wendler, W M, Kremmer, E, Forster, R, Winnacker, E L. 1997 Identification of pirin, a novel highly conserved nuclear protein. J Biol Chem;272:8482-8489.

[1928] Weretilnyk, E A, Alexander, K J, Drebenstedt, M, Snider, J D, Summers, P S, Moffatt, B A. 2001. Maintaining methylation activities during salt stress. the involvement of adenosine kinase. Plant Physiol;125:856-865.

[1929] Werstuck, G H, Lentz, S R, Dayal, S, Hossain, G S, Sood, S K, Shi, Y Y, Zhou, J, Maeda, N, Krisans, S K, Malinow, M R, Austin, R C. 2001 Homocysteine-induced endoplasmic reticulum stress causes dysregulation of the cholesterol and triglyceride biosynthetic pathways. J Clin Invest;107(10):1263-1273.

[1930] Whelan, J, Millar, A H, Day, D A. 1996 The alternative oxidase is encoded in a multigene family in soybean. Planta;198:197-201.

[1931] Wickner, R B. 1996 Double-stranded RNA viruses of Saccharomyces cerevisiae. Microbiol Rev;60:250-265.

[1932] Wildt, S, & Deuschle, U. cobA, a red fluorescent transcriptional reporter for Escherichia coli, yeast, and mammalian cells. Nature Biotechnology, December 1999;17(12):1175-1178.

[1933] Wilhelm, E P, Mullen, R E, Keeling, P L, and Singletary, G W 1999 Heat stress during grain filling in maize: Effects on kernel growth and metabolism. Crop Sci;39:1733-1741.

[1934] Wilkinson, M, de Andrade Silva, E, Zachgo, S, Saedler, H, Schwarz-Sommer, Z. 2000 CHORIPETALA and DESPENTEADO: general regulators during plant development and potential floral targets of FIMBRIATA-mediated degradation. Development;127:3725-3734.

[1935] Williams, R. L., and Katan, M. 1996 Structural views of phosphoinositide-specific phospholipase C: Signalling the way ahead. Structure;4:1387-1394

[1936] Willingham, N M, Lloyd, J C, Raines, C A. Molecular cloning of the Arabidopsis thaliana sedoheptulose-1,7-biphosphatase gene and expression studies in wheat and Arabidopsis thaliana. Plant Mol Biol November 1994;26(4):1191-1200.

[1937] Wilmink, A, Dons, J J M. Selective agents and marker genes for use in transformation of monocotyledonous plants. Plant Molecular Biology Reporter 1993;11(2):165-185.

[1938] Wingender, E, Chen, X, et al. TRANSFAC: an integrated system for gene expression regulation. Nucleic Acids Res;28:316-319 (2000).

[1939] Winkler, H H, Neuhous, H E. Non-mitochondrial ATP transport. Trends Biochem Sci February 1999; 24(2):64-68.

[1940] Wise, A, Thomas, P G, White, I R, Millner, P A. 1994 Isolation of a putative receptor from Zea mays microsomal membranes that interacts with the G-protein, GP alpha 1. FEBS Lett;356:233-237.

[1941] Wohl, T, Klier, H, Ammer, H, Lottspeich, F, Magdolen, V. 1993 The HYP2 gene of Saccharomyces cerevisiae is essential for aerobic growth: characterization of different isoforms of the hypusine-containing protein Hyp2p and analysis of gene disruption mutants. Mol Gen Genet;241:305-311.

[1942] Wojtaszek, P. 2000 Nitric oxide in plants to NO or not to NO. Phytochemistry;54:1-4.

[1943] Wolf, M J et al. 1972. Maize with multilayer aleurone of high protein content. Crop Sci 12:440-442

[1944] Woo, E J, Dunwell, J M, Goodenough, P W, Marvier, A C, Pickersgill, R W. 2000 Germin is a manganese containing homohexamer with oxalate oxidase and superoxide dismutase activities. Nat Struct Biol;7:1036-1040.

[1945] Woo, H R, Chung, K M, Park, J H, Oh, S A, Ahn, T, Hong, S H, Jang, S K, Nam, H G. 2001 ORE9, an F-Box Protein That Regulates Leaf Senescence in Arabidopsis. Plant Cell;13:1779-1790.

[1946] Woodrow, I E. Sedpheptulose-1,7-bisphosphatase from wheat chloroplasts. Methods Enzymol 1982;90(Pt E):392-396.

[1947] Wright, S Y, Suner, M M, Bell, P J, Vaudin, M, Greenland, A J. Isolation and characterization of male flower cDNAs from maize. Plant J January 1993;3(1):41-49.

[1948] Wu, J, and Seliskar, DM. 1998 Salinity adaptation of plasma membrane H+-ATPase in the salt marsh plant Spartina patens: ATP hydrolysis and enzyme kinetics. J. Exp. Bot;49: 1005-1013.

[1949] Wu, K, Lu, G, Sehnke, P, Fer,l R J. 1997 The heterologous interactions among plant 14-3-3 proteins and identification of regions that are important for dimerization. Arch Biochem Biophys;339:2-8.

[1950] Wu, T C, Lichten, M. 1994 Meiosis-induced double-strand break sites determined by yeast chromatin structure. Science;263 :515-518.

[1951] Wu, W H, Assmann, S M. 1994 A membrane-delimited pathway of G-protein regulation of the guard-cell inward K+ channel. Proc Natl Acad Sci USA;91 :6310-6314.

[1952] Xiao, B, Smerdon, S J, Jones, D H, Dodson, G G, Soneji, Y, Aitken, A, Gamblin, S J. 1995 Structure of a 14-3-3 protein and implications for coordination of multiple signalling pathways. Nature;376:188-191.

[1953] Xiao, W, Kang, S G, Jang, J -C. 2001 The role of F-box protein AtFBL3 in sugar signal transduction in Arabidopsis thaliana. 12^{th} International Conference on Arabidopsis Research, abstract 159.

[1954] Xie, D X, Feys, B F, James, S, Nieto-Rostro, M, and Turner, J G. COI1: An Arabidopsis gene required for jasmonate-regulated defense and fertility. Science. May 15, 1998;280(5366):1091-1094.

[1955] Xie, Q, Suarez-Lopez, P, and Gutierrez, C. 1995 Identification and analysis of a retinoblastoma binding motif in a replication protein of a plant DNA virus: requirement for efficient viral DNA replication. EMBO Journal. August 15;14(16): 4073-4082.

[1956] Xie, Y, Varshavsky, A. 2000 Physical association of ubiquitin ligases and the 26S proteasome. Proc Natl Acad Sci USA;97:2497-2502.

[1957] Xin, Z, Browse, J. Eskimo 1 mutants of Arabidopsis are constitutively freezing-tolerant. Proc Natl Acad Sci USA Jun. 23, 1998;95(13):7799-7804.

[1958] Xing, W, Rajashekar, C B, Glycine betaine involvement in freezing tolerance and water stress in Arabidopsis thaliana. Environ. Expt. Bot. August 2001,46(1):21-28

[1959] Xu, W, He, Y, Wang, Y, Zhao, Y. 1994 Preliminary study of brassinosterome binding sites from mung bean epicotlyls. Acta. Phytophysiol. Sin;20:298-302.

[1960] Xu, X, Dietrich, C R, Delledonne, M, Xia, Y, Wen, T J, Robertson, D S, Nikolau, B J, Schnable, P S. Sequence analysis of the cloned glossy8 gene of maize suggests that it may code for a beta-ketoacyl reductase required for the biosynthesis of cuticular waxes. Plant Physiol October 1997; 115(2):501-510.

[1961] Yaffe, M B, Rittinger, K, Volinia, S, Caron, P R, Aitken, A, Leffers, H, Gamblin, S J, Smerdon, S J, Cantley, L C. 1997 The structural basis for 14-3-3:phosphopeptide binding specificity. Cell; 91:961-971.

[1962] Yamada, T, Ohta, H, Shinohara, A, Iwamatsu, A, Shimada, H, Tsuchiya, T, Masuda, T, Takamiya, K. 2000 A cysteine protease from maize isolated in a complex with cystatin. Plant Cell Physiol. February 2000;41(2):185-191.

[1963] Yamaguchi, M, Umeda, M, Uchimiya, H. 1998 A rice homolog of Cdk7/MO15 phosphorylates both cyclin-dependent protein kinases and the carboxy-terminal domain of RNA polymerase II. Plant J;16:613-619.

[1964] Yamaguchi, M, Fabian, T, Sauter, M, Bhalerao, R P, Schrader, J, Sandberg, G, Umeda, M, Uchimiya, H. 2000 Activation of CDK-activating kinase is dependent on interaction with H-type cyclins in plants. Plant J;24: 11-20.

[1965] Yamakawa, S, Matsubayashi, Y, Sakagami, Y, Kamada, H, Satoh, S. 1999 Promotive effects of the peptidyl plant growth factor, phytosulfokine-alpha, on the growth and chlorophyll content of Arabidopsis seedlings under high night-time temperature conditions. Biosci Biotechnol Biochem;63 :2240-2243.

[1966] Yamamoto, T., Lin, H., Sasaki, T and Yano, M. 2000. Identification of heading date quantitative trait locus Hd6 and characterization of its epistatic interactions with Hd2 in rice using advanced backcross progeny. Genetics,154(2):885-891.

[1967] Yamamuro, C, Ihara, Y, Wu, X, Noguchi, T, Fujioka, S, Takatsuto, S, Ashikari, M, Kitano, H, Matsuoka, M. 2000 Loss of Function of a Rice brassinosteroid insensitive I Homolog Prevents Internode Elongation and Bending of the Lamina Joint. Plant Cell;12:1591-1606.

[1968] Yamanaka, K, Tanaka, M, Tsutsui, H, Kupper, T S, Asahi, K, Okamura, H, Nakanish,i K, Suzuki, M, Kayagaki, N, Black, R A, Miller, D K, Nakashima, K, Shimizu, M, Mizutani, H. 2000 Skin-specific caspase-1-transgenic mice show cutaneous apoptosis and pre-endotoxin shock condition with a high serum level of IL-18. J Immunol;165:997-1003.

[1969] Yamasaki, H, Sakihama, Y. 2000 Simultaneous production of nitric oxide and peroxynitrite by plant nitrate reductase: in vitro evidence for the NR-dependent formation of active nitrogen species. FEBS Lett;468:89-92.

[1970] Yang, H, Matsubayashi, Y, Nakamura, K, Sakagami, Y. 1999 Oryza sativa PSK gene encodes a precursor of phytosulfokine-alpha, a sulfated peptide growth factor found in plants. Proc Natl Acad Sci USA;96:13560-13565.

[1971] Yang, T, Poovaiah, B W. 2000 An early ethylene up-regulated gene encoding a calmodulin-binding protein involved in plant senescence and death. J Biol Chem;275:38467-38473.

[1972] Yang, W, Nadolska-Orcyk, A, Wood, K, Hahn, D, Rich, P, Wood, A, Saneoka, Premachandra, G, Bonham, C and Rhodes, J. 1995 Near-iosgenic lines of maize differing for glycine beatine. Plant Physiology; February;107(2):621-630.

[1973] Yankulov, K Y, Bentley, D L. 1997 Regulation of CDK7 substrate specificity by MAT1 and TFIIH. EMBO J;16:1638-1646.

[1974] Yanofsky, M F, Ma, H, Bowman, J L, Drews, G N, Feldmann, K A, Meyerowitz, E M. 1990 The protein encoded by the Arabidopsis homeotic gene agamous resembles transcription factors. Nature;346:35-39.

[1975] Yaropolov, A I, Skorobogato'ko, S S, and Varfolomeyev, S D 1994 Laccase properties, catalytic mechanism, and applicability. Applied Biochemistry and Biotechnology;49:257-280.

[1976] Yokokura, H, Picciotto, M R, Nairn, A C, Hidaka, H. 1995. The regulatory region of calcium/calmodulin-dependent protein kinase I contains closely associated autoinhibitory and calmodulin-binding domains. J Biol Chem;270:23851-23859.

[1977] Yoo, J G, Bowien, B. Analysis of the cbbF genes from Alcaligenes eutrophus that encode fructose-1,6-/sedoheptulose-1,7-bisphosphatase. Curr Microbiol July 1995;31(1):55-61.

[1978] Yoshida, S, Ito, M, Nishida, I, Watanabe, A. 2001 Isolation and RNA gel blot analysis of genes that could serve as potential molecular markers for leaf senescence in Arabidopsis thaliana. Plant Cell Physiol;42:170-178.

[1979] You, J, Pickart, C M. 2001 A hect domain e3 enzyme assembles novel polyubiquitin chains. J Biol Chem;276:19871-19878.

[1980] Young, T E, Gallie, D R 1999 Analysis of programmed cell death in wheat endosperm reveals differences in endosperm development between cereals. Plant Mol Biol;39:915-926.

[1981] Young, J C, DeWitt, N D, and Sussman, M R. 1998 A transgene encoding a plasma membrane H⁺-ATPase that confers acid resistance inArabidopsis thaliana seedlings. Genetics;149:501-507.

[1982] Young, J C, Hartl, F U. 2000 Polypeptide release by hsp90 involves ATP hydrolysis and is enhanced by the co-chaperone p23. EMBO J;19:5930-5940.

[1983] Young, J C, Obermann, W M, Hartl, F U. 1998 Specific binding of tetratricopeptide repeat proteins to the C-terminal 12-kDa domain of hsp90. J Biol Chem;273:18007-18010.

[1984] Young, S. A., Wang, X. and Leach, J. E. 1996 Changes in the plasma membrane distribution of rice phospholipase C during resistant interactions with Xanthomonas oryzae pv oryzae. Plant Cell;8:1079-1090.

[1985] Young, T E, Gallie, D R 2000 Programmed cell death during endosperm development. Plant Mol Biol;44: 283-301.

[1986] Young, T E, Gallie, D R. 2000 Regulation of programmed cell death in maize endosperm by abscisic acid. Plant Mol Biol;42:397-414.

[1987] Yu, D, Chen, C, Chen, Z. 2001 Evidence for an Important Role of WRKY DNA Binding Proteins in the Regulation of NPR1 Gene Expression. Plant Cell;13:1527-1540.

[1988] Yu, O, Jung, W, Shi, J, Croes, R A, Fader, G M, McGonigle, B, Odell, J T. 2000 Production of the isoflavones genistein and daidzein in non-legume dicot and monocot tissues. Plant Physiol;124:781-793.

[1989] Yu, X, Sukumaran, S, Mrton, L. 1998 Differential expression of the arabidopsis nia1 and nia2 genes. cytokinin-induced nitrate reductase activity is correlated with increased nial transcription and mrna levels. Plant Physiol;116:1091-1096.

[1990] Yukioka, H, Inagaki, S, Tanaka, R, Katoh, K, Miki, N, Mizutani, A, Masuko, M. 1998 Transcriptional activation of the alternative oxidase gene of the fungus Magnaporthe grisea by a respiratory-inhibiting fungicide and hydrogen peroxide. Biochim. Biophys. Acta;1442:161-169.Yun, S J, Oh, S_H. 1998 Cloning and characterization of tobacco cDNA encoding calcium/calmodulin dependent glutamate decarboxylase. Mol. Cells;8:125-129.

[1991] Zambryski et al., J. Mol. Appl. Genet., 1, 361-370 (1982); GenBank Accession AJ237588

[1992] Zarsky, V, Cvrckova, F, Bischoff, F, Palme, K. 1997 At-GDI1 from Arabidopsis thaliana encodes a rab-specific GDP dissociation inhibitor that complements the sec19 mutation of Saccharomyces cerevisiae. FEBS Lett;403:303-308.

[1993] Zeng, Y, and Elbein, A D. 1995 UDP-N-acetylglucosamine: dolichyl-phosphate N-acetylglucosamine-1-phosphate transferase is amplified in tunicamycin-resistant soybean cells. Eur. J. Biochem;233:458-466.

[1994] Zhang, C, Cai, Y, Adachi, M T, Oshiro, S, Aso, T, Kaufman, R J, Kitajima, S. 2001 Homocysteine induces programmed cell death in human vascular endothelial cells through activation of the unfolded protein response. J Biol Chem;276(38):35867-35874.

[1995] Zhang, H and Blumwald, E. 2001. Transgenic salt-tolerant tomato plants accumulate salt in foliage but not in fruit. Nature Biotechnolgy. August;19:765-768.

[1996] Zhao, R, Dielen, V, Kinet, J -M, Boutry, M. 2000 Cosuppression of a plasma membrane H+-ATPase isoform impairs sucrose translocation, stomatal opening, plant growth, and male fertility. Plant Cell;12:535-546.

[1997] Zheng, N, Wang, P, Jeffrey, P D, Pavletich, N P. 2000 Structure of a c-Cbl-UbcH7 complex: RING domain function in ubiquitin-protein ligases. Cell;102:533-539.

[1998] Zhong, X, Malhotra, R, Guidotti, G. 2000 Regulation of yeast ectoapyrase ynd1p activity by activator subunit vma13p of vacuolar H+-ATPase. J Biol Chem;275:35592-35599.

[1999] Zhou, H, Stiff, C M, Konzak, C F. Stably transformed callus of wheat by electroporation-induced direct gene transfer. Plant Cell Reports 1993;12(11):612-616.

[2000] Zhou, J J, Theodolou, F, Sauer, N, Sanders, D, and Miller, A J. 1997 A kinetic model with ordered cytoplasmic dissociation for SUC1, an Arabidopsis H⁺/sucrose cotransporter expressed in Xenopus oocytes. J. Membr. Biol;159:113-125.

[2001] Zhu, D, Scandalios, J G. 1992 Expression of the maize MnSod (Sod3) gene in MnSOD-deficient yeast rescues the mutant yeast under oxidative stress. Genetics;131:803-809.

[2002] Zhu, Y, Tepperman, J M, Fairchild C D, Quail, P H. 2000 Phytochrome B binds with greater apparent affinity than phytochrome A to the basic helix-loop-helix factor PIF3 in a reaction requiring the PAS domain of PIF3. Proc Natl Acad Sci USA;97:13419-13424.

[2003] Zielinskie, R E. Calmodulin and calmodulin-binding proteins in plants. Ann. Rev. Plant Physiol. Plant Mol. Biol;1998;49:697-725.

[2004] Zik, M, Arazi, T, Snedden, W A, Fromm, H. 1998 Two isoforms of glutamate decarboxylase in Arabidopsis are regulated by calcium/calmodulin and differ in organ distribution. Plant Mol. Biol 37:967-1075.

[2005] Zimmarman et al., IMPDH: regulation of expression and role in cellular proliferation and T lymphocyte activation. Prog Nucleic Acid Res Mol Biol 61:181-209.

[2006] Zimmer, S G, DeBenedetti, A, Graff, J R. 2000 Translational control of malignancy: the mRNA cap-binding protein, eIF-4E, as a central regulator of tumor formation, growth, invasion and metastasis. Anticancer Res;20:1343-1351.

[2007] Zinselmeier, C, Jeong, B -R, Boyer, J S. 1999 Starch and the control of kernel number in maize at low water potentials. Plant Physiol;121:25-35.

[2008] Zuk, D and Jacobson, A. 1998 A single amino acid substitution in yeast eIF-5A results in mRNA stabilization. EMBO J;17:2914-2925.

[2009] Zukowski, M M, Gaffney, D F, Speck D, Kauffmann, M, Findeli, A, Wisecup A, Lecocq, J P. Chromogenic identification of genetic regulatory signals in Bacillus subtilis based on expression of a cloned Pseudomonas gene. Proc Natl Acad Sci USA February 1983;80(4):1101-1105.

The application's sequence listing, which the Patent Office published only in electronic form, follows.

SEQUENCE LISTING (736 sequences)

SEQ ID NO: 1 - DNA, 1652 bp, Zea mays
  CDS (96)..(1547)
ccacgcgtccgcccacgcgtccgcccacgcgtccgcccacgcgtccgcccacgcgtccgctcctctctttccccggcacctgtcacgggaggaggatggacaagagcggcggcgaggcggcggcggcggcagcagcagcagacgacgtcgagcggcgggggggcgactacgagcaagacgagcacgagcggagagggacggtgtggacggcgacggcgcacattgtgacggcggtgatcggctccggcgtgctggcgctggcctggagcgtggcgcagctgggctgggtcgcggggcccctcgcgctcgccggcttcgcgtgcgtcacctactacacctccacgctgctcgccggcgcctaccgcgcgccgcaccccgtcaccggccacaggaaccgcacctacatggacgccgtcagatcgtacctcagtcccagggaggtgttcatgtgcggggtcgcgcagtacgtgaacctgtggggcaccatggtcgggtacaccatcacggcgaccataagcatggccgcgatcaggcaggccgactgcctccgccgggacggcgccggcgccggcgcgcgctgcgacgcgccagggaccgtgctgatgctggcgttcagcgtggtccaggtggtgctgtcccagttcccgggcctggagcacatcacctggctgtccgtcgtcgcggcggccatgtcgttcgcctactccttcgccggcctcggcctctccgtagggcactgggtgtctcgtggcggcggcggcctcgggggcagggttgcaggtgccgccgcggcatcctccaccaggaagctctggaacgtgcttctcgccctggggaacattgccttcgcctacactttcgctgaagtattgatcgagatccaggatacactcaagtcaccaccaccggagaacaggacgatgaagaaggcagcaatgtacgggatcggagccaccaccatcttctacatctccgtcggctgcgctgggtacgccgcgttcggttcgaatgctccgggcaacatcttggcggcaggcgggctgggtcccttgtggctcgtcgacattgccaacatgtgcctcatcctccacctgatcggtgcataccaggtatacgctcagcctgtcttcgcttcggttgagaggtgggccgcctcacggtggccagaagccaagttcatgagcagcgcatacaccgtgtccgtcagcatccccctcttgcagagaggatcggtcaccgtcgcgccgcacaagctcgtcctgaggaccgccatagtcggcgcgacgactgcggtggcgctggcgatacccttcttcaacgccgtgctggggctcctcggcgcgttcagcttctggccgctcacggtctacttccccatcagcatgcacatcgcccagggcaagatcgccagggggaccaagtggtggtgccttctgcaggctctgagcatggtttgcttggtgatctcggtggccgtgggtgtaggctctgtcactgacattgtcgatagcctcaaggcctcttctagccctttcaaaattgtaggctaacaggttactgtagtcatgtacaatgctctgagccgatcgtgcgttgaggtttaaaagaactgtggtgcgcgaaaaaaaaaaaaaaaaaaaaaaaaaaaaaag

SEQ ID NO: 2 - DNA, 1863 bp, Oryza sativa
  CDS (144)..(1562)
gccgcccgcttgccggagctctctatctatctctctatctctatctctatccctccagattccctcctccatcgaatctctgatatttggagggagcgactcgacgcagcatcgcatcgtaaggaaggtcccctccactgtcgatggatcagcaccagctcgacgaggagaaccagagagccgcgctcttccactcctctgccccatcttcctctttgggagctgacggggaggaggagagggagactgtgccgctgctgtcctgcaagatggccgacgataaatctgacactgtccaggtctccgaggatacggcgcaccagattagcattgatccctggtatcaagttggattcattctgacaaccggggtgaatagtgcatatgttctgggatattctgcatcaatcatggtccctttaggctggattggtgggacatgtggcttgattctagctgctgcaatatccatgtatgcaaatgctcttcttgctcaccttcatgaagttggtggcaaacgccatatcagatacagagatcttgctgggcacatatatggtagaaaaatgtattcgcttacatgggctctgcaatatgttaatctattcatgatcaacactggccttatcattttagctggtcaagccctgaaggcaatatatgtattatttagggacgatggagttctaaagctaccctactgcatagcattatctgggtttgtctgtgctctttttgcctttggaatcccttatctgtctgctctcaggatttggttgggattatcaacagttttcagtctcatctatataatgatagcatttgtcatgtcgcttagagatgggattaccacacctgcaaaggattatactattcctggatcacattcagatagaatcttcactacgataggtgctgtagcaaaccttgtgttcgcttacaacactggaatgctcccagaaattcaagcaaccataaggcctcctgtggtcaagaatatggagaaggctctatggttccagttcactgttggttcgttgcctctttatgctgtcacctttatggggtattgggcgtacgggtcctcaacatcaagctatctactgaatagtgtgaagggaccaatttggataaaaactgtggcaaatttatcggcgtttcttcagactgtcatagcattacatatatttgcaagcccaatgtacgaattcttggacacaagattcggcagtggacatggtggtccttttgcaatccacaacataatgttcagagtgggtgtcagaggaggctacctgaccgtcaacaccttggtggccgcgatgctccccttccttggcgacttcatgagcctgacgggtgcactcagcacctttcccctgacattcgttcttgcaaatcacatgtacctcacggtgaagcagaacaagatgtccatcttcaggaaatgctggcactggctgaacgttgttggcttcagctgcttgtccgtcgcagctgcggttgctgcggtgaggctaatcacggtcgactacagtacataccatttgtttgctgatatgtgaggctggaaagtgcaagcatgcagccctggatcagctgtaaattcgtcctcttcttttttatttttttggttaggggatgcatgtaggtcgatagaatgatggagattgcaataaataatttggctaaaatgttgtccagatttggttgtttgaggtgcaagatgtttgcctcaaaacgtaccgctatggttcactttttaagaactgtactgctacctctgtttgcggagatttttgtctgcaggcatgcaggatgaatattattcaagtgctctaaacgaggatccgggtaccatgg

SEQ ID NO: 3 - DNA, 1690 bp, Sorghum bicolor
  CDS (16)..(1341)
agagatagaggagcaatggctggttcgtcttcaatggacactgaagctgcaggccaacagctcaagcatggcagcggctacagcatcccggctactgctcatgcggtggacacagactcgtggcagcaggtgagcctgctgatggtgatcggcttcaactgcgcctacgtgctcagcttctccaacctcatgatggtgcccctgggctgggcatggggcgtcgcctgcctgctgctcgtcggcgccgccgcatggtacgccaactggctcctcgccggcctccatttcgtcgacggacagaggttcatccgctacagggacctcatgggcttcgtattcgggaggaacatgtactacatcacttggttcctgcagttcaccactctacttttgtgcaacatgggcttcattctactaggagcaagagcactcaaggcaatcaacagcgagtttacccacacccctgccaggctgcagtggttcgtcaccgcgacgggattcatctacttcgccttcgcctacttcgtgcccacgatttctgccatgaggaactggctcgccacgtcggccgcgctgacattagcttacgacgtcgctctgctggctatcctcatcagagatgggaaatcgaacaagcagaaggactacaacgtccatgggacccaagccgagaaggtgttcaacgcgttgggcgccgtcgccgccatcctcgtctgcaacacgtccgggctgctcccggagatacagtcgacggtgcgggagccggcggtgcgcggcatgcggcgggcgctgcttctgcagtacaccgccggcgccgcggggtactacggcatcagcgtggcggggtactgggcgtacgggtcggcggtgtcggagtacctccccaacgagctcggcgggccaaggtgggccgccgtgctcatcaacgccaccgccttcctgcagagcatcgtctcccaacacctgttcacggtgccgatccacgaggcgatggacacgcggctgcagcggctggacgagggcatgttctcccggtacaacctcacgcgacgcctctgcgcgcgggggctcgtcttcggcttcaacgtcttcgtcaccgcgctgttcccgttcatgggggacttcgtcaacctcgtcggctccttcgcgctcgtcccgctcaccttcacgttccctagcatggccatcctcaagatcaaagggaagagcggcgggagatgtaacagactttggcattgggggatcatcgttttctcctcggttctctgcgtcgctaccaccgccgccgccgttcgtctgatcttcaacaatgctaggatctaccacttcttcgctgacatgtagtaaggagtccaaaaaaaacacgattaggtgatattgccacttctcaattttttttttttgttttggtgaggaatgaaagggtcacctcatgtttggtaaggacgaccacatgcatgatcaataagcatcatgtagtcatcctatcgaaatttagaaatgagcttattgtggtggaccacctcctcaaaacaaagatctctgttcttaattaatgcgagcttaaagacaactcatgcctatatatatatatatatatatatatgctctcaagctcatgcctatatatatatatatatgtaatcgccctcaagtttattaatcaattattgtgtatttagttcaaaaa

SEQ ID NO: 4 - DNA, 1609 bp, Oryza sativa
  CDS (61)..(1485)
cacacttcctcaaatcctccaacacctcgatccattcgcagtagctgcgaggtgtctgacatggcgtcggggcagaaggtggtgaagccgatggaggtgtcggtggaggccgggaacgccggggaggcggcgtggctggacgacgacgggcgggcgcggcggacgggcacgttctggacggcgagcgcgcacatcatcaccgccgtcatcggctccggcgtgctgtcgctggcgtgggcgatcgcgcagctgggctgggtggccggccccgccgtgatgctcctcttcgccttcgtcatctactacacctccaccctcctcgccgagtgctaccgcaccggcgaccctgccaccggcaagcgcaactacacctacatggacgccgtgcgcgccaacctcggcggcgccaaggtcaccttctgcggcgtcatccagtacgccaacctcgtcggcgtcgccatcggctacaccatcgcgtcgtccatcagcatgcgcgccatcaggagggccggctgcttccaccacaacggccatggtgacccgtgccgcagctccagcaacccttacatgatcctcttcggcgccgtgcagatcgtcttctcgcagatccctgacttcgaccagatttggtggctgtccatcgtcgccgccgtcatgtccttcacctactccggcatcggcctctccctcggcatcgtccagactatctccaatggcgggatccagggcagcctcaccggcatcagcatcggagtcggcgtcagctcgacgcagaaggtgtggcgcagcttgcaggcattcggcgacatcgccttcgcatactccttctccaacatcctcatcgagatccaagacacgatcaaggcgccgccgccgtcggaggcgaaggtgatgaagagcgcaacgaggctgagcgtggcgacgaccacggtgttctacatgctgtgcgggtgcatgggctacgcggcgttcggcgacgcggcgcccgacaacctcctcaccggcttcgggttctacgagcccttctggctgctcgacgtcgccaacgtcgccatcgtcgtgcacctcgtcggcgcctaccaggtgttcgtccagccaatcttcgccttcgtcgagcgctgggcctcccgccggtggccggacagcgcgttcatcgccaaggagctccgcgtggggcccttcgcgctcagcctcttccgcctgacgtggcgctcggcgttcgtctgcctcaccaccgtcgtcgccatgctcctccccttcttcggcaacgtggtgggtctcctcggcgccgtctccttctggccgctcaccgtctacttccccgtcgagatgtacatcgcgcagcgcggcgtgccacgtggcagcgcgaggtgggtctcactcaagacgctcagcgcgtgctgcctcgtcgtctccatcgccgccgccgcgggctccattgctgacgtcatcgacgcgctcaaggtgtacaggccgttcagcggatgattcttctgattctctcttgctgctttgagcagagcatccactggtaaaaagtggacagtaattttctttttttacagtctatggacgtagtacagtaaaaaagtgtgtacaactgtaaaaa

SEQ ID NO: 5 - DNA, 1626 bp, Zea mays
  CDS (63)..(1427)
tgcaccaattcctgaggcaccaaccaagcctctcttgttgactccgacgccgatcgacggccatggggacccaagcgccggagaaggagaactacccccctgaaaaggatgcgaggagcgcacgggagaaggccatcgacgagtggctcccgatcacctcgtcgcggaacgccaagtggtggtactccgccttccacaatgtcaccgccatggtgggcgccggcgtgctcagccttccctacgccttgtccgagctcggctggggccctggcatcgccgtgctggtggtgtcgtgggtgatcacgctgtacacgctgtggcagatggtggagatgcacgagatggtgcccgggaagcggttcgaccggtaccacgagctggggcagcacgcgttcggcgagaagctgggcctgtggatcgtggtgccgcagcagctggtcgtggaggtgggcgtgaacatcgtgtacatggtgaccggcggcaggtcgctgaagaagttccacgacgtgctggtgtgcggcgacggcggggcgtcgtgccaggggaaggacaacatcaagaccacctacttcatcatgatcttcgcctccgtccacttcgtcctctcccagctccccaacttcaactccatctccggcgtgtcgctggccgccgccgtcatgtcgctcagctactccaccatcgcgtggggcgcgtcggtggacaagggcaggatggcgggcgtggactaccacctgcgcgcgaccacgacccccggcaaggtgttcggcttcttcggcgcgctgggcgacgtggcgttcgcgtacgcggggcacaacgtggtgctggagatccaggccaccatcccgtcgactcccgagaagccgtccaagaagcccatgtggaagggcgtcgtcgtcgcctacgtcgtcgtcgcgctctgctacttccccgtcgcgctcatcggctactgggcgttcggcaacagcgtccaggacaacatcctcatcacgctcagcaggcccaggtggctcatcgcgctcgccaacatgatggtcgtcatccacgtcattggcagctaccagatctacgccatgccagtgtttgacatgatagagacggtgctggtgaagaagctgcgcttccctcccggtctgacactgcgtctcatctctcggaccgcctatgttgcgttcacaatgttcatcgccatcaccttccccttcttcggcggactgctcggcttcttcggcggattcgcctttgcaccgacgacctatttccttccctgcgtcatgtggctcgcgatctacaagcccaagaggttcagcctctcgtggttcaccaactggatctgcatcattctcggggtgatcctgatgattctgtcgccaatcggagggcttcggcagatcataatggacgcgaaaacgtaccagttctactcgtaaaatgctaccagacactgagttttttgtcgtgccaacaacagaggggaacttcctggtaccatgtataagctgttacagatgttgggttagctatatacatacatgcatacgtattgtttcttaattaatgttccaaggtgaccgtgggttgtgtatatggtataaaggagaatcgatgatggtggttgtcccaaaa

SEQ ID NO: 6 - DNA, 1656 bp, Oryza sativa
  CDS (89)..(1426)
gcgtcgagctgcctagctatcgagatcttcgtacgtaaatacgtctccctcgtctccggcgagccaccggcttgggcgtacgtgagagatggcgccgccgtcagccatgaacacgtcgagggcggaggagaaggccatcgacgactggctccccatcacctcctcccgcaacgccaagtggtggtactccgctttccacaacgtcaccgccatggtcggcgccggcgtcctcagcctccccttcgccatgtccgagctcggctggggtcctggggtggcggcgatgatcatgtcgtgggtgatcacgctgtacacgctgtggcagatggtggagatgcacgagtgcgtgccggggcggcggttcgaccggtaccacgagctcgggcagcacgcgttcggggacaagctggggctgtggatcgtggtgccgcagcagctcatcgtcgaggtcggcgtctgcatcgtctacatggtcaccggcggcaagtcgctcaagaagttccacgacctcgtcgcgccgccctccgcgccgcccatccggacctcctacttcatcgtcatcttcggctgcctccacctcgtcctctcccagctccccaacttcaactccatcaccggcgtctccctcgccgccgccgtcatgtcgctcagctactccaccatcgcctgggccgcctcgctccaccaccacaaccacaacaatggcgccgccgccggaggcgtggactactcgctgacggcggcgacgccggcggggaggacgttcaacttcctgagcgcgctgggggacgtggcgttcgcgtacgcggggcacaacgtggtgctggagatccaggcaacgatcccgtcgacgccggagcggccgtccaaggggccgatgtggcgcggcgtcgtgctggcctacggcgtggtggccgtctgctacctccccgtggcgttcgcggggtactacgtgttcggcaacgccgtggacgacaacgtgctcatcacgctggagcggccggcgtggctgatcgccgccgccaacatattcgtcgtcgtgcacgtcgtcggcagctaccagatctacgccatgccggtgttcgacatgctcgagaccttcctcgtcaagaagctccgcttcaaacccggcatgcctctccgcctcatcgcccgatcactctacgtcttgttcaccatgttcgttgccatcgccgtccctttctttggtggattgctaggcttctttggtggctttgcgtttgctccaacgacctacttcttgccatgcattatgtggctgtcgatcatgaagccaaagaggtttggcttgtcctggtgcatcaactggttctgcatcatcatcggcgttcttctgtcggtgttcgcaccaatcggaggtctccgctcgatcatcgtgaatgcccagagttacaagttcttctcgtgagtgattaattgagaggtgttttaccattcaattaagtgtgttcttaattaattaggggattgttttagataatgcacagagttctatttaattagatgaaagagaaattcgtgtgtccctaaaaaaaaaaaaaaaaaaaaaaaaaaaaaaaaaaaaaaaaaaaaaaaaaaaaaaaaaaaaaaaaaaaaaaaaaaaaaaaaaaaaaaaaaaaaaaaaaaaaaaaaaaa

SEQ ID NO: 7 - DNA, 1671 bp, Zea mays
  CDS (116)..(1453)
ctcggcagcaggacccgccgccgcctcctctccatctctttctctctctctcgccatatcgattccattggggacgcaagcaccgccccagacccagagcttctcttctcaaaagatgcaggagcaggacgtggacgatggcggcggcaggacgacccagcagcaggagaagtcgatcgacgactggctccctatcaactcctccaggaaggccaagtggtggtactccgccttccacaatgtcaccgccatggtcggcgccggcgtgctcggcctcccctacgccatgtccgagcttggctggggccctggcatcgcggtgatgatcctgtcgtggataatcaccctatacacgctatggcagatggtggagatgcacgagatggtgcctgggaagcggttcgaccggtaccacgagctcgggcagcacgtcttcggcgacaggctgggcctctggatcgtggtgccgcagcagctggcagtagaggtgagcctgaacatcatctacatggtcaccggcggccagtccctcaagaagttccacgacgtcatctgcgacggcggcaggtgcggcggcgacttgaagctctcctacttcatcatgatcttcgcctccgtccacctggtcctctcccagctccccaacttcaactccatctccgccgtgtcgctcgccgccgccgtcatgtcgctcagttactccaccattgcgtggggcgcgtcgctgcacagagggaggagagaggacgtggactaccacctgcgcgccacgaccaccccagggaaggtgttcggcttcctgggaggcctaggggacgtggcgttcgcctactcggggcacaacgtggtgctggagatccaggccaccatcccgtccacgccggacaagccgtccaagaaggccatgtggaagggcgcctttgtcgcctacgtcgtcgtcgccatctgctacttccccgtcacgttcgtcgggtactgggccttcggcagcggcgtcgacgagaacatcctcatcacgctctccaagcccaagtggctcattgccctcgccaacatgatggtcgtcgtccatgtcattggcagttaccaggtttatgccatgccggtgtttgacatgatagagacggtgctggtcaagaaaatgaggttcgctccgagcctcacgctccgtcttattgcccggagcgtctatgttgcgttcacaatgtttctaggcatcactttccccttcttcggtggattgctcagtttcttcggcggattagccttcgcaccgacaacttattttcttccctgcatcatgtggctcaaggtttacaagcccaaacggttcggcctttcatggttcatcaactggatctgcatcgttattggagtgctgctgttgattctgggtccgataggagggctccggcagatcattttgtcagccaccacatacaaattctaccagtaaaatcgatcaactggagtcgtatggcgtggctgttttgttagcattacatttcttagggtggattggcttttaatgtacacgagcgagtgagattgatgctagtagctcctaggagtatatatatttctatcatccacagagcttaatgtatcttgtagttgggacaaaaaaaaaaaaaaaaaaaaaaaaaaaaaaaaaaaaaaaaaaaaaaaaaa

SEQ ID NO: 8 - DNA, 2071 bp, Oryza sativa
  CDS (313)..(1731)
cactcctctcccctccccacgcaaccgccttcctccgccgccgccgacgccgacgccgacgccgaccccttctcccaatctgcggattccagcgggggtcccccccccctcccaccggcggcgcccggtggtcgtggtcgtgggggaggggagtcaacgaacgagccgagccgcccgcttgccggagctctctatctatctctctatctctatctctatccctccagattccctcctccatcgaatctctgatatttggagggagcgactcgacgcagcatcgcatcgtaaggaaggtcccctccactgtcgatggatcagcaccagctcgacgaggagaaccagagagccgcgctcttccactcctctgccccatcttcctctttgggagctgacggggaggaggagagggagactgtgccgctgctgtcctgcaagatggccgacgataaatctgacactgtccaggtctccgaggatacggcgcaccagattagcattgatccctggtatcaagttggattcattctgacaaccggggtgaatagtgcatatgttctgggatattctgcatcaatcatggtccctttaggctggattggtgggacatgtggcttgattctagctgctgcaatatccatgtatgcaaatgctcttcttgctcaccttcatgaagttggtggcaaacgccatatcagatacagagatcttgctgggcacatatatggtagaaaaatgtattcgcttacatgggctctgcaatatgttaatctattcatgatcaacactggccttatcattttagctggtcaagccctgaaggcaatatatgtattatttagggacgatggagttctaaagctaccctactgcatagcattatctgggtttgtctgtgctctttttgcctttggaatcccttatctgtctgctctcaggatttggttgggattatcaacagttttcagtctcatctatataatgatagcatttgtcatgtcgcttagagatgggattaccacacctgcaaaggattatactattcctggatcacattcagatagaatcttcactacgataggtgctgtagcaaaccttgtgttcgcttacaacactggaatgctcccagaaattcaagcaaccataaggcctcctgtggtcaagaatatggagaaggctctatggttccagttcactgttggttcgttgcctctttatgctgtcacctttatggggtattgggcgtacgggtcctcaacatcaagctatctactgaatagtgtgaagggaccaatttggataaaaactgtggcaaatttatcggcgtttcttcagactgtcatagcattacatatatttgcaagcccaatgtacgaattcttggacacaagattcggcagtggacatggtggtccttttgcaatccacaacataatgttcagagtgggtgtcagaggaggctacctgaccgtcaacaccttggtggccgcgatgctccccttccttggcgacttcatgagcctgacgggtgcactcagcacctttcccctgacattcgttcttgcaaatcacatgtacctcacggtgaagcagaacaagatgtccatcttcaggaaatgctggcactggctgaacgttgttggcttcagctgcttgtccgtcgcagctgcggttgctgcggtgaggctaatcacggtcgactacagtacataccatttgtttgctgatatgtgaggctggaaagtgcaagcatgcagccctggatcagctgtaaattcgtcctcttcttttttatttttttggttaggggatgcatgtaggtcgatagaatgatggagattgcaataaataatttggctaaaatgttgtccagatttggttgtttgaggtgcaagatgtttgcctcaaaacgtaccgctatggttcactttttaagaactgtactgctacctctgtttgcggagatttttgtctgcaggcatgcaggatgaatattattcaaaaaaaaaaaaaaaaaaaaaaaaaaaaaaaaaaaaaaaaaaaaaaaaaaaaaaaaaaaaaaaaaaaaaaa

SEQ ID NO: 9 - DNA, 1813 bp, Oryza sativa
  CDS (110)..(1450)
cccttcttcatcttcttctttttcgtcttcttcttcttcttcttcttcttcctctgatattgctgcaaaagaagaagaggtagacgaaggaggaggagatcaggtgatcatggggactcaggtggcagataactacccaccggccaaggatggccggagcgcgcaggagaaggcgatcgacgactggcttcccatcacgtcgtccaggaacgccaagtggtggtactccgccttccacaatgtcaccgccatggtcggcgccggcgtcctcagcctcccctacgccatgtccgagctcggctggggacctggcatcgcggtgctgatcctgtcatggatcatcacgctctacacgctgtggcagatggtggagatgcacgagatggtgcccgggaagcggttcgacaggtaccacgagctcgggcagcacgcgttcggcgagaagctgggcctctggatcgtggtgccgcagcagctcgtcgtcgaggtcggcgtcaacatcgtgtacatggtcaccggcggcaagtcgctgaagaagttccacgacgtgctctgcgagggccacggctgcaagaacatcaagctcacctacttcatcatgatcttcgcctccgtccacttcgtcctctcgcagctcccaaacttcaactccatctccggcgtgtccctcgccgccgccgtcatgtcgctcagctactccaccatcgcgtggggcgcgtcggtggacaaggggaaggtggccgacgtcgactaccacctgcgcgccacgacgtcgacggggaaggtgttcggcttcttcagcgcgctgggcgacgtcgcgttcgcgtacgcggggcacaacgtggtgctggagatccaggcgaccatcccgtcgacgccggagaagccgtccaagaagccgatgtggaagggcgtcgtcgtcgcctacatcatcgtcgcgctctgctacttccccgtggcgctcgtcggatactgggcgttcggcaaccacgtcgacgacaacatcctcatcacgctctccaggcccaaatggctcatcgcgctcgcaaacatgatggtcgtcatccatgtcatcgggagctaccagatctacgccatgccggtgttcgacatgatcgagaccgtgctcgtcaagaagctcagattccctcccggcctcacgcttcgcctcatcgcaagaacactctacgttgcgttcaccatgttcatcgcgatcaccttcccgttcttcggtggattgcttgggttcttcggtggattcgccttcgcgccgactacttacttccttccctgcatcatgtggctagcaatctacaagccaagaaggttcagtctctcatggttcaccaactggatctgcatcattcttggagtgatgctcatgatcctgtcaccaatcggaggactccggcagatcatcatagatgccaagacatacaagttctactcatagattacatgttcatcatagtaatctcatgtggctgcaagttcaagttctactcataggcacacatgatgaaaccagttactgcaaaagttttttttttagccaacaaaggaagaagaaagttcaacaccaagttcatacattgtcactacgacgatgatcttttgagacgtgtcatgcatgcatcagtcgttaattatgtgacttaattaaaaacaaagaggttgtgtttgtgcattgtcgctgggttaatcatactgtgtttttatatttcaatctactattatactgtaggctggacatggaaactgtgtgcagaaagatgaaagggatggataattactggttgattcttttgctttc

SEQ ID NO: 10 - DNA, 974 bp, Arabidopsis thaliana
  CDS (61)..(801)
ctctctcagcttacgaacaagaaaaaaagaagaatctttagccacctttgagatcaaaagatgaacatcgctcacactatcttcggcgttttcggaaatgcaactgctctgtttcttttcttggctccttcgataacattcaagagaatcatcaagaacaaatccactgaacaattctctggtatcccttatccaatgactctcctcaactgtctcctctctgcttggtatggacttccctttgtgtcaaaagacaacacacttgtgagcacaatcaatggcacaggagcagtgatcgaaacagtctacgtgttaatctttcttttctacgcaccaaagaaggagaaaattaagatctttggtatcttctcttgcgttttggctgtattcgcaacagtagctctcgtctctctctttgctcttcaaggaaacggtagaaaactcttttgtggtctcgcagctactgttttctccatcatcatgtacgcttctccactctccatcatgagattggtggtaaagacgaagagtgtagagtttatgccattctttttgtcactctttgtcttcctctgtggtacttcgtggttcgtctatggtctaatcggtcgtgacccttttgttgcaatcccaaatgggtttggatgtgcattagggacactgcaattgatactatacttcatctactgtggaaacaaaggagagaaatctgcagatgctcagaaagatgagaagtcagtggagatgaaagatgatgagaagaagcagaatgtggttaatggaaagcaagaccttcaagtttaaaagagcttttgaggatgatttggttatgtgatttcgtattaactctgcttaactagagttttccttttcgtttcgttggaatgtaaaaaaaatgatgctgaaaaatgtaacgtttcctagtttcgtactgatacactagtgattgatgaagaatgacgatgccttttgtg

SEQ ID NO: 11 - DNA, 1163 bp, Oryza sativa
  CDS (136)..(1008)
ccgtgttgtagtgttgtgtagcagtagtccaccgctgagaagctagcaaagccagccatccattcagcgcagtactctcgggagagctagaagcgatctattctagccacaaggaggagagataaacgtatcgaaatggagcacatcgcgaggttcttctttggagtttccggcaatgtcatcgctctcttcctgttcctttcgccagttgtcaccttctggaggatcatcaagaagagatcaacggaggacttctccggcgtgccttacaacatgacacttctcaactgcctgctatctgcttggtacgggctgccgttcgtgtcaccgaacaacatcctggtgacgacgatcaacgggacggggtcggtgatcgaggccatctacgtggtgatcttcctcatcttcgcggagaggaaggccaggctgaagatgatgggtctcctgggcctcgtcacctccatcttcaccatggtggtgctcgtctccctcctggccctgcacggccagggccgcaagctcttctgcggcctcgccgccaccatcttctccatctgcatgtacgcctcgcctctctccatcatgaggctggtgatcaagacgaagagcgtggagttcatgccgttcctgctctccctgtccgtgttcctgtgcggcacctcctggttcatctacggcctgctcggccgcgaccctttcatcgcgatccccaatggatgcgggagctttctgggcttgatgcagctgatcctctacgcgatctaccggaaccacaagggggccacgccggcggcggcggccgggaagggggacgccgccgacgacgtggagatggccgaggggaggaacaacaaggtcgccgacggcggcgccgccgacgacgactcgtacggccggcggcaaggcgggcaccgaagtgtagctctggcgtgcgtctcgaatcggctaagatttcccgcgtgtgttctacttctacaagtagtaatattagctagacccttgctgctttgatctttactagaaaggagagcgcggcgccacgccgcgcgcgatggcaaatagttctacataaaatggttagatagtagatacatattttgataaatatagtctacatttgtttaataaacagagtacaatgaagtataaaaaaaaaaaaaaaa

SEQ ID NO: 12 - DNA, 2501 bp, Oryza sativa
  CDS (425)..(464),(546)..(582),(672)..(783),(812)..(898),(988)..(1149),(1556)..(1675),(1776)..(1952)
ttcagaaaaaaacttttagtcttgccctagtatttgtttcatgagttgtgtcttaatcaacaaacggttgggctcatgaaatgacactattggtggttgtgatattctttgctaaattttagagtttagttcccacaatctttacttgttctgattaatgtttcaataaaaaaagaagcgaatgtatgcttttgaaagcaaccggatgccaaacggagcataatctgtttgtgccatcctactgaatttcatggagcatatgcatagcttttggccttctgtgcttcatccacccattctgcatttcagacttttaagtatgctttaggcattataaatagacagacccacacttggagcaaagaagtaactattttgtcaaatactagtccattcgagttgaaacgttcagtgaacagctagaatggtttccaacacaatccgtgtagcagtaggaattctaggtacttctcttctgaatgttcttggaataaattcagattttcattattttcagagcataatttagtgtctcccactttcaggaaatgctgcttccatgctcctgtatgcagcacctatgtatgtacatcacatccacagataccatacatgatcagaatttatttcatttgctatctttgcttatcaatgtgctctgaaaatcacagattaacatttaggagggtgatcaagaagggcagtgtagaagaattctcttgtgttccatacatcttagctctgttcaactgcctcctgtacacatggtatgggcttcctgtagtaagctcaggatgggagaattctacagtgtcttccatcaatgggcttggcatactgcttgagatcgcattcatcagcatatacacatggtttgcacccagagaaagaaaggcaagttctttgcagaggaattcttcagatattcatgatacatgaactcttgaaacaatgttttgacaggcttatctaatgatcttatttcagaagtttgtgttgcgaatggtgctacccgttcttgcattctttgcgctgacagcaattttttcaagctttctgtttcatacgcacggtttacgcaaagtttttgtgggtagtattggcctggtggcttccatatcgatgtacagctctccaatggtagctgcagtgagtatctttcacatatactgccctacttcagagtcataatctgcacagacaaaattaagttccaaatagcattaacttcaagaaaaaaacttgtattgacaaggaataagtacagatcatatccataggagtgatgaaacaattcggcatctcaaaaaaagatatcataaacatggctaaacttgaaagaacataattaatcaacaccagtctaccactaacagataaatgcttgccttttcaactactaagccttttctcaattctctcttcaataagtttccaatctttattagaaagcttcctaaatcaaattcggaagttggaactgtgtacaagaagaattgttttcatttttcttacgcggtaatcttaaattttctaatggagctaacatttgcagaaacaagtcataacaacaaaaagtgtggagttcatgcccttctacctgtcattgttttccttcctctccagtgctctatggatgatatatgggcttctagggaaggatctcttcatcgcggttagtacataccgggtacatatgtttttattcagagatggatcgatcgagctgtaaaatcactctgttttcatttctttcttctgcttgtttcgtgcagtcaccaaacttcattggctgtccaatgggtatccttcagttggtcctgtactgcatttacaggaaaagccacaaggaagctgaaaagcttcatgacatcgaccaggaaaatggtctgaaagtggtaaccacgcatgagaagataactggaagggagccagaggctcagagagattgatgtgttttatgtactcacttggggactttgtttcatttctgttgtcttaagagtaggtacgatagcagactacaaacatattttaaggagataaagaaaagagagaaaagcaacgggctataaatttgtagctagccgcaacacactccaagatgcaatgtatgtataacaggtgggatcaagtattaatagtgtagtaactattgtatgaattagctattaaattaattataaatgattaggagctagtagttgactatactattaaacttgctcttagggcactcgcaatggttatctataggctctctacaagagatccatgtcagcatattttttctcttggaagagattaaatgaagagagagagcaaagctatctattaacctgaagatagtctatagagaaaaacgaggcaatggattagagagctatagatacccatgtagatatactattgaggtggtttaccattaatctagtgtattgctgagatgtacatattttatagagagtacattactttaccattaccattgcgggtgatct

SEQ ID NO: 13 - DNA, 1925 bp, Zea mays
  CDS (29)..(1495)
ccacgcgtcctcggacgcgtgggtgtcgatggattacttggctgctgctgtacccgtgaccttggctctgggagtgggagctatcttgttggtcttacgatggacgtactgccgccgccgaacaagcgccgaagaagcaagactgcccccggggtcaaggggcctcctgttcctgggggagacgctccactacctggcagcgtcctccaccccgggggtattgccaccattcttccagcgacggttggagaggtatggccccatcttccggacgaacctggtcggggaggatctcgtcgtgtcgctggacgcggagctgaacgcgcacgtgctgaagcaggaggagcgcggcttccagatctggtacccgccctccttcatgcgcgtcttcggcgccgacaacatcaccgccaagctcggcgtgctccaccgccacatgaggaccctcgtgctccgcctcttcggccaccagaccgtccgctccgtgctgctgcacgacgtgcagcggagcgcgcgcgacgagctgcgctcatggctcggccgcccggacgtcgaggtcaggacggccacctccaggatgatatttggcgtcactgccaacaagctgatcagccatgacgacgcagcatctggaggcacgttgtggagatgcttccacgactggacttcggggctgctctcgtttccggtttccattcccggcacaaccttctacagatgcatgcagggacgtaagaaggttatgacgatgctgaaacagcagctcgtcgagcgtcgacggaacgcagcggagcgcgagacgacagaggatttcttcgatctcgtgatcgatgaactgaacaagccagaccctatgatggacgagagcaccgcgttggacttgctgttcaccatgttgtttgcgagccatgagacgacgtccatggtattaaccgtcatactcaagtatctgactgacaacccaaaagctttgcaagagctgacagaggagcacgaaagaatcctggaaagtagggccgatccaggctctgacctcacgtgggaggagtacaggtctatgaaattcacatctcatgttatacatgagtcgctaaggctcgcaaacatcgcactggccatgttcaggaaagcaaatcaggatgtgcacataaatgggtacacaattccaaaaggatcaaagatcatgatgtgtgcactagcatcgcacttgaatacggaggtctacgaggacccctcagtgttcaatccatggagatggaaggatattcctgaaccagtcggcacctctaaggactttatggccttcgggggtggtttgcgcctatgcgctggtgccgagttttccaagatgcagatggctatgttcctccattacttggtcacaaattacagctggaaacccgtcagcggtgggacaatgttattctatccaggactgcaatttccagaaggcttccacatccagcttcttccaaaaatcccaaacgtggttccataaaccctatgaagaaatatgaatacgaataatttaagcaaatattctaaatgtaccctggggaattgaagttcgataacgatgtggtacgggctgatttggtaaccatggatcacaggaggatgggagaggattgatggagaaattagttcatttctccctcaacctctttcaatcctcttatgatccacttatcaccaaatcaaccctaatgatagcaggtcgaattgtcggaacaaataatagtttcaccaaacagaaggggagtatgcatgtgtgtaactttttatagttataaataatagtagagtaaattcagctcgttgtgtaacaactatgcaggtgagtaaaaattggttcagcatattgtatatattatgcccagttcaatggaaaaaaaaactttgttgtcaaaaaaaaaaaaaaaaag

SEQ ID NO: 14 - DNA, 1915 bp, Zea mays
  CDS (141)..(1637)
ccacgcgtccggaaagatttttcttccctcctccgacgccccagcccaccaacacactctataaagcagccctcagtcacacacagaacgcacaagcgcaagccgggcaagaaaactccgcaggccagtctgcgagttggatggccttcttcttggccctcgtgtgcatcctcatcttgctagccatcgcctcctacgtccagtacactcgctggcaaaaggggaaaggccgcttcggcggccatgggaggtctgctcccttgaagctgcctcctggctccatgggctggccttaccttggcgagaccctccagctttactcccaggaccccagcttcttcttcgcttccaaacagaagaggtacggcgagatcttcaagacgcaccttctgggttgcccgtgcgtgatgctggcgagcccggaggcggcgcggttcgtgctggtgacgcaggcgcacctgttcaagccgacctacccgcggagcaaggagcgcatgatcgggccgtcggctctcttcttccaccagggcgactaccacctccgcctccgcaagctcgtccagggcgcgctcggccccgacgcgctgcgcgcgctcgttcctgaggtggaggccgccgtgcggtccactctcgcttcctgggacgccggccacgtcagaagcacgttccacgccatgaagacgctgtcgtttgatgtgggcatcgtgacgatcttcggcggccggctggacgagcggcgcaaggcggagctgaggaagaattactccgtcgtggagaaggggtacaactccttccccaacagcctgccggggacgctccattacaaggcgatgcaggcgcggcggcggctgcacggcgtgctgtgcgacatcatgcgggagcgtcgtggccaggcccaggcggcgggcaccggcctgctgggctgcctgatgcggtcccggggcgacgacggcgcgccgctcctgagcgacgagcagatcgccgacaacgtcatcggcgtgctgttcgcggcgcaggacacgacggccagcgcgctcacctggatcgtcaagtacctccacgaccaccccaagctgctcgaggccgtccgggcggagcaggcggcggtccgcgaggccaccggcggcgggaggcagccgctggcgtgggcgcacacgaagagcatggcgctaacgcatagggtgattttggagagcttaaggatggcgagcatcatctcgttcacgttcagggaggccgtggccgacgtggagtacaaagggttccttatccccaaggggtggaaggtgatgccgctcttcaggaacatccaccacagcccggactacttccaggatccacacaagttcgacccttctagattccaggtggcgccgcgtccgagcacgttcctgccgtttgggcacggcgtgcacgcgtgccccgggaacgagctggccaagctcgagatgctcgtcctcatccaccacctggtcaccggctacaggtggcaaatcgttggatccagtgacgaggtcgagtacagcccgttccctgtgcccaagcacggcttgcctgtcagattatggagacaaaacaatccggtcgacagaaaggggcgtgagaccgacgacgatcatgtggagaggatatttatttagtttgactcttgagttaggcatgaatttaaccccaagctagctagagaagttttttttcccctttgaaattcttctttgctcgcctcttcctcctggatcaaattgcgttggaggagaagaaacggcagctttctctctttcgttttctttgcctgcttcaccgctacgataatggtgaaaatatgtaagctacgtggacatcaatgatccacagcatcgttgatatatataatatatagagaaaattctctgcaaaaaaaaaaaaaaaaaaaaag

SEQ ID NO: 15 - DNA, 1886 bp, Zea mays
  CDS (104)..(1657)
ggcctcacccttttccctggtgttgcaagttgcaacacacagcgtccggcgagatcggcgatcagaaaccacgagcccacccaccatccggaacgcgcgcgcgatgtgtcccgtcagaggcggtggttgttcttggccagcgtccgtcgtcggctctgtcacggcggcgctgctcctcgccgccgtcatcgtgcggctcttcgtcccccgtgcctgttcttcaggaattatcaaggggcggcggcaggtaggtgctggtgctgccggaggagcacggctccctgccggctcgctcgggtggccgctcctcggcgagacgctggcgttcatccgggccgcgtactcgcctcgcccggagtccttcgtcgagaaacgccgcgtcttgtacgggaaggtgttcaagtcgcacctgtgggggtcgccggcggtggtgagctcggacccggaggtgagccgcgcggtgctgcaggccgacgcgtcggcgttcgttccatggtacccgcgatcgctcatggagctgatggggcaatcgtccatcctagtgctcggcggcggcctccagcgccgggtgcacggcctcgcgggcgccttcttcaagtcgccgcagctcaaggcgcaggtcaccctggacatgcagcgccgcgtcggccgcgccatggacatgtggggcaggcgccatcggagcatgggcgacgacgacagcggtggtatgcccgtgcgtgtgcagaacgaggccaagtcgattgtgttcgaaatcctagtgagggcgctgatagggttagaggaaggggacaagatgcagtacctcaggcaacagtttcaagaattcattgccggtttgatatcacttccggttaagcttccggggactcaactctatagatccctcaaggctaagaagaggatgacaaagttgataaaaacgatcatccaagagaagaggaagaagatgatgtcggaaggcgacgaggatctgcgtggtgggactcatccacgtgacatgatcgacgtcctgctaggcaacggcaacgacgagctctccgacgagctgatatctgacaacatgatcgacttcatgatccctgcagaggactccgtgcccgtgctcatcacgctggccgtcaagtacctcagcgaatgcccactggctctgcagcaactcgaggaggagaacatggagctcaagaggcagaaatcaggcgcgggagaaaccctagaatggacagactacatgtcgctcgccttcacacagcacgtgatcacggagacgctgcggatgggcaacatcatcaacgggatcatgcggaaggcggtgcgagacgtggaggtgagaggccacctggtcccgaagggctggcgcgtcctcgtctacttccgcgccgtccacctcgacgccgccgtccacgacgacccgcacgccttcaacccctggaggtggaaggagaggcccgacgtcgtggccatgagcggcttcaccccgttcggcggcggccagaggctgtgccctgggctcgacctggcaaggctcgaggcctccatctttctgcaccatctcgtcaccaatttcaggtgggtggcggaggaggacaccgtcgtcaacttccccacggtgcggctcaagcgagggatgccaatcgcagtgacgcccagaacctgctgaacgcaacgcaacttgccaggcaaaaccatactatacatttatactccgtaatcaactaaagaggtgtgagaaataatacagtacatgcaagcatgtaatggagggcgaaattaaaagttggcacggcaaaggcgccgatggtatgccaaaagttcagtttgcaaattatatagtttaattgctattacactaggggcacccatgtctgatgcctcgtttatgaaaa

SEQ ID NO: 16 - DNA, 1844 bp, Zea mays
  CDS (81)..(1589)
ccacgcgtccgatctgtcactccccgacacgcgcacgagctccactccccactccgcacccaacccaaggcgccactgccatggacgcgggcggtccgccgccgctgttcctcctgggcgccgtgctggccgcggcgctggggtggctgctcgtggtctggcgggcggcggcggggcggcggcggtccgcgtcggcgcggctgccgccggggagcacggggctgccgctcatcggggagacgctgcggctcatcgcggcgtacaagtcgccgaacccggagccgttcatcgacgagcgcgtggcgcggcacggcagcggggtgttcacgacgcacgtgttcggcgagcgcaccgtgttctccgccgacccggccttcaaccgcctgctgctggccgcggagggccgcgccgtgagctgcagctacccgtcgtccatcgccacgctgctgggcccgcggtcgctgctgctcacctcgggccccgcgcacaagcgcctccactcgctcacgctgacccgcctcggccgcccggcctcgccgccgctgctggcgcacatcgaccgcctcgtcctcgccaccatgaggggctgggaccgccccggcgccggcgccatgcgcctcctcgacgaggccaagaagatcaccttcaacctcaccgtgtggcagctcgtcagcatcgagcctgggccgtggaccgagagcgtccggcgcgagtacgtgaagctcgtcgacggcttcttctccatccccttccccttcgcctccctcctcccgttcaccgtctacggccaggccctcaaggcgaggaagaaggtggccggagctcttcgggaggtggtaaggaagaggatggacgacaaggcggaggacgactgtggcgccagtaagaagaacggggagaagaaggacatggtggaggagctcctagaagcggagggcgggagcttctccgtggaggagatggtggacttctgcctgtccctgctggtggctgggtacgagaccacctccgtgctcatgacgctcgccgtcaagttcctcaccgagacacccaccgcactggcgcagctcaaggaagagcacgacagcatcagaggggtaaaaggcaaaggccaagctctggaatggagcgattacaagtcgatgccgtttacacaatgcgtgataagcgaaacgctgcgcgtggccaacctgatcagcggggtgttcaggcgtgcgaacaccgacatccacttcaaaggccacgtgatcccaaagggctgcaagatcttcgcgtcgttccgagccgtgcaccttagcctggaccactacgagaacgcccggaccttcgacccttggagatggcagcagggcaagagcaagctgcagagcgcggaaggggccagtctgttcacgccgttcggcggcgggccgcgcctgtgcccgggctacgagctcgcccgggtggtggtttccgtcttcctccaccacctcgtcacgcgctttagctgggaggaagccgaggaggacaggattgtcttcttccccaccacccggaccctcaagggataccccatcatcctacggcggcgaccggattgcgatgatctctgacctcatggctaggttccccccttatcttcttcggatcaaggctgaaggctaagcattagatagagtaaggtggatgtcgtcgtggctagtaggtgcatggtggtttctgccactcactcactcactcactctgttgtctgtttgttcctgttcctctctgttttctcttgctctgtaacctggacctggtacgagtcagcactcagcagccagcagcaaactcgcgttttgcttgtaaaaaaaaaaaaaaag

SEQ ID NO: 17 - DNA, 1843 bp, Zea mays
  CDS (92)..(1648)
gcctctcctcctctcccctgccctcgcaaacgcacgcaccacagcatcgtccttcgttccattcccatccataccccctcgatcggccgggatgctgggtgtggggatggccgcggcggtgctgctcggggccgtggcgttggtgctcgcggacgccgctgcgaggagagcgcactggtggtacagggaggcggctgaggcggtgctggtcggcgccgtggctttggtggtggtggacgccgcggcgcggagggcgcacgggtggtacagggaagcggcgctgggctcggcgcggcgggcgcggctgccgccgggggagatggggtggcccttggtcggcggcatgtgggccttcctccgcgccttcaagtccggcaagcccgacgccttcatcgcctccttcgtccggcggttcggtcgcacgggcgtgtaccgaagcttcatgttcagcagcccgactgtgctggtgacgacggcggaggggtgcaagcaggtgctgatggacgacgacgcgttcgtgacggggtggcccaaggcgacggttgcgctggtcgggccgcggtcgttcgtggcgatgccgtacgacgagcaccggcgcatccgcaagctgactgccgcgcccatcaacggcttcgacgcgctgacggggtacctgcccttcatcgaccgcaccgtcacgtcgtcgctgcgcgcgtgggcggaccacggcggcagcgtcgagttcctgacggagctgcggcgcatgacgttcaagatcatcgtgcagatcttcctgggcggcgcggaccaggccaccacgcgcgcgctggagcgcagctacacggagctcaactacggcatgcgcgccatggccatcaacctgcccggcttcgcgtaccgcggggcgctgcgcgcgcgccgccgcctcgtggccgtgctgcagggcgtgctggacgagcgccgcgccgccagggccaagggggtctcgggcggaggagtggacatgatggaccggctgatcgaggcccaggacgagcgcgggcggcgcctggacgacgacgagatcatcgacgtgctcgtcatgtacctcaacgccggccacgagtcgtccggccacatcaccatgtgggccaccgtgttcctgcaggagaatccggacatgttcgcgagagcaaaggcggagcaggaggcgatcatgaggagtatcccgtcgtcgcagcaggggctgacgctcagggacttcaggaagatggagtacctgtcgcaggtgatcgacgagacgctgcggctcgtcaacatctccttcgtctccttccgtcaggccaccagagacgtcttcgtgaacggatacctcatccccaagggctggaaggttcagctctggtaccggagcgtgcacatggacccacaggtgtaccctgaccccaccaagttcgacccgtcgaggtgggagggccactcgccgagagccggcacgttcctggcgttcgggctgggcgccaggctctgccccggcaacgacctcgccaagctggagatttccgtcttcctccaccacttcctcctcggctacaagctggcgaggacgaaccctaggtgccgggtgaggtacctgccgcacccgaggccggtggacaactgcttggccaagatcaccagagtcggtagctagctgctagattgtgatggaagtacgaatgaaaaaaaagcccagcagaaaactctagcggctgggccggctggaaattatgggccgggccattgtggttgcccccccctgtctgtgcaaaaataaaacaagcagaaaggaataaaaaaaaggaaaagtattacttcgaaaaaaaaaaaaaaaaaaaaaaaaaaa

SEQ ID NO: 18 - DNA, 1795 bp, Zea mays
  CDS (134)..(1543)
attcggctcgagcccatctcatctcttgctcctcgtccgtagttgcagttgcagtgtcctcggccgcctctagtcctagccgtttactccttcctttcaccgcatcaagcagagagcaagcgaggcaagagccatgggcgcctttctgctcttcgtctgtctcctggcgccggtcgtcgtgctcgcctgcgccgtccgcggcaggaagcggcgggcgtcctccgcggcggcgggcggcaaggcgctgccgctgccgcccgggtcgatggggtggccgtacgtgggcgagacgttccagctctactcgtccaagaaccccaacgtgttcttcgcccggaagcagaaccggtacgggccaatcttcaagacgcacatcctgggctgcccctgcgtgatggtgtccagcccggaggcggcgcgcttcgtgctcgtcacgcaggcccacctcttcaagcccaccttcccggcgagcaaggagcgcatgctggggccgcaggccatcttcttccagcagggcgactaccacgcccacctccgccgcctcgtctcccgggctttctcccccgaggccatccgcggctccgtgccggccatcgaggccatcgcgctgcgctcgctcgagtcctgggacggccgcctcgtcaacaccttccaagagatgaagctgtacgcgctgaatgtggcattgctgtccatcttcggcgaggaagagatgcggtacatagaggagctgaagcagtgctacctgaccctggagaaggggtacaactcgatgcccgtgaacctgccgggcaccctgttccacaaggccatgaaggcccgcaagcgcctgggcgccgtcgtggcccacatcatcgaggcccggcgcgagggcgagcggcagcgcgggagcgacctcctggcctccttcctggacgaccgcgaggcgctcaccgacgcccagatcgccgacaacgtgatcggcgtcatcttcgccgcccgcgacaccaccgccagcgtgctcacctggatggtcaagttcctcggcgaccaccccgccgtcctcaaggccgtcatcgaggagcagcaggagatcgcgcggtccaaaggctcctccggcgagcccctgacgtgggcggacaccaggcggatgcgcacgacgagccgtgtgatccaggagacgatgcgggtggcgtccatcctgtccttcaccttccgggaggccgtggaggacgtggagtaccaagggtacctgatccccaagggctggaaggtgatgcccctgttccggaacatccaccacagccccgaccacttcccctgcccggagaagttcgacccctcccgattcgaggttgctcccaagcccaacacgttcctgccgttcggcaacgggacccactcgtgcccgggcaacgagctcgccaagctggagatgctcgtgctcttccaccacctcgccaccaagtacaggtggtccacctccaagtccgagagcggcgtgcagttcggccccttcgcgctgccgctcaacggcctgcccatgaccttcgtccgcaaggactgatgagccgccgacagatgtgtggatcgtggacggagccacaccaaaaccacggcaggccgacggaaccaaaccaaagccaacaacaaacaggcggatggatatggtatggcggtatatgctagctagtactactataggagccgcgaaaaccgcttccgggatttggcgttgcggcggtcgccatcggacgggacggggacaggcatcaggcaagcatgggatgatcacagaggaaaaaaaaaaaaaaag

SEQ ID NO: 19 - DNA, 7001 bp, Oryza sativa
  CDS (183)..(476),(706)..(735),(2796)..(6734)
tactacagggcaccgcacagtgcagcggccagcagtgcagtacaccactgcagagtgcagacgaaggcaagcgtggctgcaaccgcaagcagcaaaagcaaaaccccggaagcttcccccaaaatctctctctccctctccccactataaatcctcccctctcgtcgatcgccatggctcccatgctctcgatcgcctcccgctcgccctcgccggcgttgattgcacctcacgcctccgcccgcgccaccggtcttcgtgctccgttcgccggcaaccgcattgtggggtgggggtggggggatcaaaccaaatcaggtacggatcgtaatcgcgcatcgatctgtgtcgtcctgttcctgcgcgtccgctccggcgagcccacgcaggcgccgcgggatccccctgctgcggtaggcggcggcggctgctacgtccggctgccggcgccgccgcgagaccgggacgcggttttggtaagcacgatccatttctttctcccccgaattccgacccgctcgtttggttgattggtttcgattcggtcgtgcggcctcgggtcacgtacatttacttctactacgagcaagcctaataatacagccgacttgttggttataaggttctgtgtagcattctctcagcctacccatataatagttagctccttacaattaatacagggctcacatgtctctctcgtagagtttcttggttcctgtgtctaagccggctgtaagtttatagcccgcttctcctctctctcctctcttttctcctccacctcaatatttaaccggcttatagtctactattatacttgctctactacgaccatagcagtacaagcgtgcagttttggagtttattaaactttaaagttggagtagttgtactactatccgaaacgtaattagtaagcgcaagtcaattctactatcggacaagtaattacgtttcggttagtagttttttaatatatctctcgtttaatgcgagtagcggcttataagacaaagacatgtgtacaagcggcgataaataactatagactatagagtatggaccttatatttctactagctaaataatcatgcttttatacggattaaaacaaattaaggtttttgggacaatttcattctagatgaaataagatagaatcatatgtagaaggattattttataacattaaagcatgtagagtaattggaagaaaacatgatggggtagtcggtaaataaaaaaaaacttggtgaggtggcaacattgctctcttttataaggagtatagattcttagcggcccaaaactaaagttaaaaatggaaaattacgaaaaccttaaattaattatatatctcatgggatttaaatttggttgctgcttataagccaacgagggtctaggaaccgataaaatttgtaaaaccaaagggcgataaataaatctcagggatacgaacacatatgcttcagccagtgcccggtggatagaaaggctatacataggaaagggaaaagagacttgcaaaaatactattgttctagtagaaagtttcatgttggtaattaatttaactttttttttgatcaaagggccttaaccctccatttccattaaaagaaatgtcacagtttacagcagaaaaaaaaaacagacttaatttaacatttgtctcagttcttcagcaattgaaagttgtttcgtctggagttgggataattttactagttttacaaaggattattctgtgggacttgaatatattaacttgcggttttgagtttgtgccgtgtgatgtcgattgaagtgtggattggtcctttctttcttgaatatgttgccatctgcttttgaaatgttggcactcttgacaaattgacaaagaaaatattaggcttgtttgctaatcatttcttattttcttgtagttgtatgtagtcgacggttccagaaaactgagtagctgacaggtgctgcctttttcttgttgcaggatttatttctcaaagactaccatttcagattactgaagttgggcgatctgcataactagcacggtgccacggtttttgagaagaagaacgagcaatggttcgacaggtacctggtttaagttctttctttcagctgtttgcctggacacttcattgcattgggtcgatgttctgggctgtcaagaactctgctgcctgaacaatgatgttttttttgtttatctagttagtttgcatgtgaaaatatcattagtttattcatatttatattgaatttttattagacatatttactgcatttctttagctttgctattacatttacttcatttgttgagcagatatgcataagctagattcttctatctaaaaatatgtataagctggacagcccccaaatacatagccttgagtagaaaacaatactatatctcaaaatataagattcatagtatcagctatgcctataccatacacatcaaattcactgtatcataaaaaacgagatttggagggagaggcgttcctccaacaattaaataagaaattgtgagcgtgttggggattgaacacgggattttggggttaaaaccacacatcccttgcgctgcattatcaagtgcatctcaaattcactgtatcatagtctacctgtaattgctgagcatttgcaaattagaaccttgaacataagtcaagtgttataattctttccttcagctgttggtattgttattgattttgttacctgaataacgatgcctttcattgtaactctccctttcctttttccagtatcacgtttgcttgttcactctacttctctgcttcatccctatcactgctttggcggaatccgatatcaagaatttatttgctctgaggaaagcaatcgctgttggaaaaggcttcctccacaactggtttgagctagaaactcctccatgcaactggtcaggtatatcatgcgtggggcttactgttgtggccatagacctgtcatctacgccactctacgtcgattttccatcacagatcattgcattccagtcactcgttcggctcaatgtaagcgggtgcgggttttccggtgagcttccagaagccatggtgaatctgcagcatctccagcacctagatttgagtgataatcagcttggtggccctctacctgcctcattatttgacttgaagatgctgaaagttatggtgcttgacaacaacatgttctctggacaactaagccctgccattgctcaccttcagcagctcaccgtgctatccatatccacgaattccttctctggaggcctccctccagagctaggcagtctgaagaacctggagtacctcgacattcacacaaatgcatttagtggatcaataccggcatctttcagtaatctatctcggctcttgtaccttgatgcaaacaataacaatctcaccggatcaatattcccgggaataagagcgttagtcaaccttgtcaagctcgatttatcgtcaaatggtttggtgggggcaatccccaaggagctttgtcaactgaaaaatctgcaaagtttaatcctatcagacaatgagttaactggaagcatcccagaagagattggtaatctgaagcagcttgaagtactcaatctcctcaaatgcaatctcatggacaccgtccctttgtcgatcggcaatctcgaaatcttggaagggctttatatatcattcaacagcttcagtggtgagcttccagcatctgttggtgagctacgcaatctgaggcagctgatggcgaagagtgcagggttcactgggagcataccgaaagaactcggcaattgcaagaagcttactactctagttctgtccggcaataacttcactggcactatacctgaagaacttgcagatttagttgccgttgtcttgtttgatgtggaaggaaacagactctcaggccacattcctgattggattcagaactggagtaatgtttcatctatatcgcttgcgcagaacatgttcgacggacctctaccgggtcttccattacatctggttagtttctctgcagaatccaaccggctgtcaggatctatccctgccaagatatgtcaaggcacctttctgcagatacttagattgaatgataacaatctgaccgggagtatcgatgagacatttaagggatgcaagaaccttactgagctaagcttgctagataaccatctccacggagagataccagaatacttagctttgctaccactggtgtcacttgatttgtcacataacaatttcacagggatgatccctgacaggttatgggaatcatcaaccatcttggacatctctctcagtgataaccagctaactggcatgatcacagagagcattggtaagctcttgagcttgcaatcgttgagcatcgacagaaactacttgcaaggacctctccctcgatcgatcggcgctctaaggaatctgacagcactgtctctcagtggcaacatgctatctgaggacattccaatacagctcttcaactgcagaaaccttgtcacattggacttgagctgtaacaatctgacagggcacatccccaaggccatatctcacttgacaaagctcaacaccttggtcctgtcccggaatcggctgtcaggcgctatcccttctgagctatgcgtggctttctcgcgcgagtcccattctgaattggagtacgtgcaacacattggattgattgatctgtcgcggaacagattgactggtcacatcccgagagcaatcaacaattgttctatactggtagagctacacctgcaagacaacttgttaagtggcactatacctgtggaacttgctgagctgagaaacataacaaccattgatctatcttccaatgcattggttggacctgtccttccatggcctgtaccattggcaagcctccaaggccttcttctgtctaacaacagactcagtggctccattccttctggcattggcaacattcttccccagatcacaatgctggacttatcgggtaacgcgcttaccggcactcttccattggatctactctgcaaagagagcctaaaccacctggatgtcagtgacaacaacatctctggacaaatcccattttcctgtcatgaggacaaagaatccccaatcccactgatcttcttcaatgcaagcagcaaccatttctcagggagcctggatgaatcgatctccaacttcacaaagctgacctatcttgatctccacaacaacagcctcactggaagattgccatcagcaatagcaagggtcacttctttgtactatcttgacctatcaagcaatgatttcagtggcaccatcccttgtggtatctgcggtatgtttggcctgaccttcgcaaacttctccggtaaccgcgacggtggcactttcaccttggcagattgtgctgctgaagaaggcggggtttgcgccgctaaccgtgtcgatcgaaagatgccggatcatccgttccatgtactggaagcaaccatttgttgcattgcaacggccattgtcattgtgctggtggtgatcctggtggtttatctgagacgacggaggaagatgttgagaaggaggcagtttgtccttgtccctgccggtgacaacgccatggctgaccatgagacaaccttgagtaacaatcttttggggaggaggaggatgaagaagagggagccaccgagcatcaacctcgcgacgttcgagcacgcgcctgtgagggtcaccgtggacgagatcatgagagccaccgggaatttcgacgggatgcacgtcgtcggcgacggcggcttcggcaccgtgtacagggcggagctccccggcggccggagggtcgccgtcaagaggctccacggcgtcggccgccggttccagggcggcgaacgcgagttccgcgccgagatggagaccgtcggcaaggtgaggcaccccaacctcgtccccctcctcggctactgcgccgccggcgacgagcggttcctcgtctacgagtacatggagcacggcagcctggaggaccggctgcgcggcggcggcggcgcggcgctcgggtggccggagcggctcacgatctgcggcggcgccgcccgcgggctcgcgttcctgcaccacggcttcgtgccgcacgtcatccaccgcgacgtcaagtccagcaacgtcctcctaggcgagggcctccagccgcgggtgtccgacttcggcctcgcgcggatcatcagcgcgtgcgagacccacgtcagcaccgtcctcgccggcacgctcggctacatcccgccggagtacgcgctggcgatgcggtgcaccgccaagggcgacgtgtacagcttcggcgtcgtcatgctggagctgctcacggggcggccgccgacgtggtcgtcggcggaggtgacggcggagggtgacgacgagcgcggcggcggcgggagcctcgtcgggtgggtgcggtggatggcggcgcgcgggcgtggcggcgaggtgttcgacgcttgcctgccggtgtccggcgcggagcgggagcagatggcgcgggtgctcgacgtcgcccgcgactgcaccgccgacgagccgtggaggaggccgaccatggcggaggtggccaggagggtgggggcgatcgaggcgatggagtacgggcctctggtggtggcagtgtccagtggcgagccgccggcgatgccatgatcttgctgctgctatactgtatactgtagtgcatcatgctcctttttgtgaattaaggtgttttgatctcatcttatatgcggacacagagatgcagcagaaactcaattttttaacaagttcatacctcacaggcatttcatcaaacacctgttatgcgtgcaaccaacccgctcattataacctcatctttttttttaatgcttatccttataagttaatatttaaaattttcaaccttaaatttgaatttcattttaggttttt

SEQ ID NO: 20 - DNA, 1593 bp, Oryza sativa
  CDS (235)..(1227)
cgacgacgcctccctcgtacgccggcgctctcgcagttgccgccgccgccgcgaacgcccaccgcccgcgctctggtcggtggatcgtgacgtgctgtggtggtctctgatctgctctgggggtgggtgggcgtctcgcggagtcgccgtgttcgtcgagggctcgatcggctcggggagagcgagtgagaagaggtgagggttggggggaggcacatccgcggcggcggagagatggcggatttccggacctccacgcatcgggagaggtggatcttccagacgaacgatctgatggatagatggggggcggcgaaccagcgggccacggagacgctcgttcagtatggaacgacgcggttgaaggtggaccctgttgatgggtcgctgtcatacccggaacctgcgcctgatcatgttgtagggagctcaggtgtaaagcctctgtcttgtgaagaggagcgattgatgcgggtattttatgagcaaaagattcaagaagtatgttcagcatttaagttccctcacaaaatccaggctaccgcaataatatatttcaagagattttatctgcaatggtctgtaatggaacatcacccaaagcatattatgttaacttgtatttattcttcttgcaaagtggaagaaaatcatgtttctgctgaggaacttggtaaaggaattcaacaggaccaccagattattctaaataacgagatgattgttctcaaatctttagattttgatctgattgtttatgctccgtatcgatctatcgaaggatttgttgatgacatggaggatttctgcagagcaggtaatggtgagcaccaacggttgcaggatttacgtcaaactgcgatatctcaggttgacaaaatgatgttgactgacgctcctcttctctacactcctggacagttggctctggctgctttgcacaaatccaatgatatgcacaagatccttaattttgaaaggtacttggaaagtgttttttcaaggcaacattctgattgtccaatcgaacaatttgttgggtcaatcaatatgatcaattatttggttgagcagcttaaaatacctactcctaaggacatgaggcatattgaccgcaagcttaagcattgtttggatccaagctcacaggatgagcataagaagaaagagaagaagtcgaagcacaaatcaaaaagggcagctaatgaagcccaacttgacagctagaaaacatacggttgggctgcaccgtgtaagaatcagttctttagtttgttgtggctccaattgatcaaaagagctactttcctgagcaggtgaggttccgttttagccgaggacaaccaattttgagatgaagcgagataatacccatgacctcgccttcttgtaatcttgtatgcctggaagccctagcaaactcctcgttgcaatggctactgtactttttttggggggtaatttatcccttgtcaaatgggaagaagcagcatacatcggatgattgcctccatatacgaaaatgacagctaactcagacttttgtcggttgcatttttctgtttaaaaaaaaaaaaaaaaaaaaaaaaaaaa

SEQ ID NO: 21 - DNA, 1764 bp, Oryza sativa
  CDS (173)..(1447)
cgcgcatcgcagccgagacgagccgccccccgcaccgcactctccgccgccggccgcgccgacctcctccgccgcgccgcctccccggcgcgcgcccccgtcaccctctctcgcctcgccgccgccgccgctgcctcctcgtgaggggggacggtggtgggggcctctgcctatggcgagcggcgacggcggcgacgacgcgggcgtgaagcgcgtggcggaccgctacctgaagcgcgaggtcctgggagagggaacctacggcgtcgtcttcaaggccgtcgacaccaagactgggaatacagtcgcaataaagaaaatccggctagggaagtacaaggaaggtgtcaatttcactgcattgagggaaattaaacttcttaaggagctgaaagattctaatattatagagctgattgatgctttcccttacaagggaaacttacatcttgtatttgagttcatggagactgatttggaagctgtcatacgagataggaacattgtattatctccagctgatacaaaatcttatattcagatgatgttaaaaggtttagccttctgccataagaaatgggtgctacacagggatatgaaaccaaataatttactcattggcgctgatgggcagcttaagcttgctgactttggtctggcgcgcatatttgggagtccagagcggaacttcactcatcaggtctttgcacgatggtaccgagcaccagaattattatttggcaccaagcagtatggatctgcagttgatatttgggctgctggttgtatttttgctgaactgctgcttaggcgaccgtttctccagggttctagtgacattgatcaacttgggaagatctttgctgcatttggaactccaaagtcttctcaatggccggacatggtttatcttccagattatgttgaataccaatttgtctctgcacctccacttcgctcattgtttccaatggccagtgatgatgcattggatcttctatcaagaatgtttacatatgatccaaaagcaagaattacagctcagcaggctctagaacaccggtactttttatcagtaccagcgccaacaaaaccatcacagcttccaaggccaccacctaagggtgattcagggaataacaagataccagacttgaacctgcaggacggccctgttgttctgtccccgccaagaaagttgcgcagggtgactgcccatgaagggatggaagtccatatgcatcgggcggatagaacagaagagcatccttcaggggcaaggcacatggatgacatgtccagccagagttctagaataccaatgtcagttgatgttggagctatttttgggacacgacctgctcctagaccaacgttaaacagtgccgacaagtctcgtttaaaacggaaacttgatatggatccagaatttggatacacagagtaaatcaccattttttccatactggcttgttgatttttaaaatattctttggggagatagttccactatctaccaacaaaagaggattgtgtcgaaagccataaaaacttcactgaagggcgctgacaggatggcacagccaactatgctgttatcgtttttgactaccaaagccggctcaggaagaggaaactgaagagttacgtgttacgatgctaatttacaccaggacgtgcacatgccatttcattttggctggcatacataaatctgtaatctttattgcatagatgagtttgcttgtgtgagcatgtttcttc

SEQ ID NO: 22 - DNA, 1583 bp, Glycine max
  CDS (14)..(1240)
attcggctcgaggatggatcctccaccgaagagctggagcatccacacccgatccgagatcatcgcaaaatacgaggtcatggagcgggtcgggtcgggagcctacgccgacgtctaccgtggccgtcgcctctccgacggcctcaccgtggccctcaaggaaatccacgactaccagtccgccttccgagaaatcgacgcgttgcagctcctcgagggctccccaaacgtcgtggttttgcacgagtacttctggcgcgaagacgaggacgccgtcctcgtccttgagttcctcagaaccgacttggccaccgtcatcgccgacaccgccaaggccaaccagcccctccccgccggcgagctcaagtgctggatgatccagattctctccggcctcgacgcctgtcaccgccacatggtcctccaccgagatttgaagccctctaatctcttaatttccgaacacggcctcctcaagatcgctgattttggacaggcaagaattctcatggagcctggtattgatgcttctaataatcatgaagaatattctagagttttagatgacattgacaataaggatactattactagcacccacgatgggaatgcaacatgcaacacaagtgacgtagatagggaagaggaagaacttggttgttttacgtcatgcgttgggactcgttggtttagggctcctgagttgctttatggatcaagaaactatggtttagaggttgatttgtggtccttgggatgtatctttgcagagcttttaacgctgcaacctttgtttcctggaactgctgatattgaccagcttagtagaatcattggtgttttgggtaaccttgatgagaatgcttgggctgcttgttctaaacttcctgattatgggataatctcctttagcaaggtggagaaccctgctggtcttgaagcttgtttgcccaatcggtcccctgatgaagtggctctggtgaaaaaactggtttgttatgatcctgccaagagggccacggcgatggagctgcttcatgacaagtactttagtgatgagcctcttcctgttctggtttctgagctgcgagttcctctgaccagaaaagagcaagatggggattcccctggtgggtggggtgatatcaacgatatggattccgattccgattcccagtttgatgagtttggccctctgaatatcacaaggactggtactggtttctccatacagtttccttgaagaattcaaggtacattgtattcttggaactgcctttttgccttttctgtcgtgttgctcaactgttactatttgctggaaattcttcggtgagaatattgataagaaaaatccctttttttttttctgatttgtcattcacttgtgaacaaagggataaattattcaaaagtaattagaatgattgtgtgtttacatgacattcatagttgaccatgacactcacagttgatagtttatataatacatggacttgtatccttccaaattcacacatataatgatagcacgtactatagttatttttgtgttaaaaaaaaaaaaaaaaaaaaaaaaaggc

SEQ ID NO: 23 - DNA, 964 bp, Zea mays
  CDS (164)..(745)
cggacgcgtgggtgccgttgaggcataccgcatacgtttctcccccattcctctccccactccgaaccctagccaccgtgctcacttcccaggtcgaacccgccgcggcgcgagtccacggcagtgcaggacctgatcctgcggtctaggccgcggcggtgagatggtgatggtgtcaggcggcggggggaacgcgtgggcgaaggagatgaccctccgccgcaggatagccagcatattcaacaagacgcaggaacacttccctactctgaaagactacaacgattatctggaagaagttgaggatatgactttcaacctgatcgaagggatagatgtcgaggagattgaagcaaaaattgcaagataccaacaggaaaatgcggagcagatatacttgtccagagctaaaagggcggaagatcttgcggcagcacttaaagcaagcaggatgaaccctgtaaaggccgaagcaaatgatacggctgctgggagttctcagggtattagtggcggggcaggagttcagggccagtatgcacctgccgctgttcttgggggagtggctcagcctcgccccacaggtatggcgccccaactaatcggcagtgggtcggatcctctgcaaggagacgacgaggagaccaggagactacgcgcagagcgagcagcacgggctggcggatggactgctgaattgagcaagagaagagcgctggaggaggcgtttagcgccatattcatctaggattagatcaaaaagcaacacatggcctggaggaaagccagcatacttaaaatggctgtcaaactacaaagcgttggatgatctgtgtcgtgattatctttgggacatggaattctcacaaattgtggtgaagcaccctttgtgtgcctttggttgcaaaaaaaaaaaaaaaaaaaaaaaaaaaaaaaaaaaaaaaaaaaaaaaaaaaaaaaaaaa

SEQ ID NO: 24 - DNA, 1961 bp, Zea mays
  CDS (198)..(1484)
ttcgcccttctactctgggctcagcggccgcccgggcaggtgccaaaagtccggaccacagctcgcgccgcccgccgcgccttgcccagacgtgcgctcccttctcccgcgccgtcgcctctgccctggccgacccgctgggcccagtgtgcgcagccctcccgggttaaggcggaggtgcttggggacccgctcccatggcgagcgccggcatcagcggcagcggggacgacgatgcaggagggaagctcttggcggatcgctaccagaagggcgaggtcctcggcgagggcacgtacggagtcgtcttcaaggccttcgacaccaagactggaaatacagtcgcggtaaagagaatctgggtagggaaggacaagaaggaaggtgttaacttcaccacattgagggaaattagactacttaaggagctgaaaggtcctaatattatagagctgattgattgtttcccttacaaggaaaatttgcaccttgtatttgagtttatggaaactgatctggaagctctcataaaagataagaacataatactgtctccagctgacacaaaatcatatctccagatgctgttaaaaggtctatcgttctgtcataagaaatgggtgatacacagggatatgaagccaaataatttactcattggtgccgatgggcagctcaagcttgctgactttggtctggcccggatgtttgggagtccaggaaggaacttcactcaccaggtctttgcacgttggtaccgggcaccagaattattatttggttcgaagcagtatggatctggggtggatatttgggccgctggatgtatttttgctgaactgcttactcgcagagcctttctccagggttctagtgacattgatcaacttgggaagattttcgcagcacttgggaccccaaaatcttctcaatggcctgacatggtttatcttcctgattatgttgaataccaatatgttgctgcaccaccgctacgtacattgcttccgatggccagtgatgatgctttggatcttttgtcaaaaatgcttacgtatgatccaaaagcaagaatcagtgctcagcaggctctagagcacaggtacttttcatcgttacctgctccaacaagaccatcacagcttctaaggtcacggtggaaaggagatcaagggaataacaagatgcccgatctgaacctgcagcatggccctctggtgctctctccgccaagaaagctacgtagggtgatagcgcatgaatggatggaaggtatgcacagggcagataaagtggacgagcatccttctgggatgaggcacaccgatgacatgcccagtcagaagagttctagaattccaatgtcagttgatgttggagctgtgtttggcacacgacctgcacctaggccaacattgaacagtgcggacaagtctcgtttaaaacggaaacttgatatggatccagagtttggatttgcggagtaaaagaaactttgttaacatgcaccattcttttcttactgagatgttggtttcgaaaatattctttgggagatatttccacagttcactcagaaaagaggatttgcattgaagccacaaaactgcaccgaaggattctgacacaatcaactgggctgttaccgacatcggctcacgaagaggaaaacaaaggagaggccattctaatttatcctgagtcgcatggggcattatagctaaccgattccgtaaagaaggctcttagaaacagcatgctctatgccatgcgagtggagagtgttatgtggaattgggggcatagaaacgctcgctccagttagaaatgtgtgtttgtgctaaatgtgatctactagtcctccattctccgtggtttcaatttccttcaattcttgtacggacacttaggtttgagcattcttcactcagtcactttacgtataaaaaaaaaaaaaaaaa

SEQ ID NO: 25 - DNA, 6440 bp, Saccharomyces cerevisiae
  CDS (1552)..(6087)
tagttttctatggtggagtgaagcacagcagaaagaacgttaggaaccttagctaaaagatagaaaaaaagagcactacaaaaatcttatcctcgatttgaaatactaatgtcgagccagatcaaattaaatgaaatcgaaatgatataacgttgctcttgcacgtgtatttcgctgcttaggaaagttgtttccacatattatcttttgtacgattttaaacagtaaaatcgatgcatattaagggaggcccaatacccgcgggcagtaaccgcatctttggaaataccgggtaataataaatgcccgggaaaaaagagcataaaacagagaggcgatataggaatgaatatgtgctatttacggaagggaaaaacacttattgtttttctgaaatgtgacacagtaaagtccgtcatatacggttctccgttgggcgctaccacacacatatatataagcctgaatgcagtagacaaatttcagatatcatacaaaggaagcgttctctgggacccctttctatgtttagatggttcactgaacttgttcgttaacgtaaatatgtcttcctctttgattccaacaatgatattataaggaaattatcgtcacaatctaatcaacaaggacaaagaaaagaaaaagttgagagagagaacaaaagttcaaatcaaagaaaaaaaagaacatcaaattacctattacaataaacaattaagccatactcgcaacaatttgccataatagaaagcagcacctcgttggcgcagtcccttacatagtacacaacatttatcacttcacacaatcaggagtggaactcaatggaaaacaacaccacacgtatgatcttactaataaaagaacatgaacgttcctcagcgcgaacgttcgcattctgcgccttcgagcacaggataagttgcaggaagccatcacatctatgcaacgattatcacgacacaaccttgccgccgagaaaacgtccgtggagaaccattcggtcgattgcttcccacggaacgagtggactgaaacttaagactgcccctctctttccgcggaatcgctcatgccgcggtgccacaacattttcagatttactaagactccggtgagtgtgggctcacccgcgggtcgtgatcacgattcagcaccctttggactcgtgattccgtggaaaggtcagatctgtattcctacttatggtaatgtgctaaaaaaagagaaatgtctccgcggaactcttctacgccgtggtacgatatctgttgaacgtaatctgagcaatacaaacaaggcctctcctatacatatataattgtgatgtgcataaccttatggctgttcgcttttattatcataccttagaatgaaatccaaaagaaaaaagtcacgcaaagttgcaaacatataacaactgtgttagttatcactcgactttgttattctaattataaataaattggcaactaggaactttcgaaaaagaaattaaagacccttttaagttttcgtatccgctcgttcgaaagactttagacaaaaatgcccgaggccaagcttaacaataacgtcaacgacgttactagctactcctccgcgtcttcttctactgaaaacgctgctgatctacacaattataatgggttcgatgagcatacagaagctcgaatccaaaaactggcaaggactctgaccgcacagagtatgcaaaactccactcaatcggcacccaacaaaagtgatgctcagtctatattttctagcggtgtggaaggtgtaaacccgatattctctgatcctgaagctccaggctatgacccaaaattggaccccaactccgaaaatttttctagtgccgcctgggttaagaatatggctcacctaagtgcggcagaccctgacttttataagccttattccttaggttgcgcttggaagaacttaagtgcttctggtgcttccgcagatgtcgcctatcagtcaactgtggttaatattccatacaaaatcctaaaaagtgggctgagaaagtttcaacgttctaaagaaaccaatactttccaaatcttgaaaccaatggatggttgcctaaacccaggtgaattgctagtcgttttaggtagaccaggctctggctgtactactttattaaaatccatctcttcaaatactcatggttttgatcttggtgcagatactaaaatttcttacagcggctactcaggtgatgatattaagaaacattttcgtggtgaagttgtttacaacgcagaagctgatgtacatctgcctcatttaacagtcttcgaaactttggttacagtagcgaggttgaaaaccccacagaaccgtatcaagggtgtcgatagggaaagttatgcgaatcatttggcggaagtagcaatggcaacgtacggtttatcgcatacaaggaatacaaaagttggtaacgacatcgtcagaggtgtttccggtggtgaaaggaagcgtgtctccattgctgaagtctccatctgtggatccaaatttcaatgctgggataatgctacaaggggtttggattccgctaccgctttggaatttattcgtgccttaaagactcaagctgatatttccaatacatctgccacagtggccatctatcaatgttctcaagatgcgtacgacttgttcaataaagtctgtgttttggatgatggttatcagatctactatggccccgccgataaggccaagaagtactttgaagatatggggtatgtttgtccaagcagacaaaccaccgcagattttttgacctcagttacaagtccctctgagagaaccctgaacaaagatatgctaaaaaaaggtattcatataccacagaccccgaaggaaatgaacgattactgggtaaaatctccaaattacaaagagctaatgaaagaagtcgaccaacgattattgaatgacgatgaagcaagccgtgaagctattaaggaagcccacattgctaagcagtccaagagagcaagaccttcctctccttatactgtcagctacatgatgcaagttaaatacctattaatcagaaatatgtggagactgcgaaataatatcgggtttacattatttatgattttgggtaactgtagtatggctttaatcttgggttcaatgtttttcaagatcatgaaaaagggtgatacttctacattctatttccgtggttctgctatgttttttgcaattctattcaatgcattttcttctctgttagaaatcttttcgttatatgaggccagaccaatcactgaaaaacatagaacatattcgttataccatccaagtgctgacgcttttgcatcagttctatcagaaataccctcaaagttaatcatcgctgtttgcttcaatataatcttctatttcttagtagactttagaagaaatggtggtgtattctttttctacttattaataaacattgtcgcggttttctccatgtctcacttgtttagatgtgttggttccttaacaaagacattgtcagaagctatggttcccgcttctatgttattgttggctctatccatgtataccggttttgctattcctaagaagaagatcctacgttggtctaaatggatttggtatatcaatccgttggcttacttattcgaatctttgttaattaacgagtttcatggtataaaattcccctgcgctgaatatgttcctcgtggtcctgcgtatgcaaacatttctagtacagaatctgtttgtaccgtggttggagctgttccaggccaagactatgttctgggtgatgatttcattagaggaacttatcaatactaccacaaagacaaatggcgtggtttcggtattggtatggcttatgtcgtcttctttttctttgtctatctattcttatgtgaatacaacgagggtgctaaacaaaaaggtgaaatattagttttcccacgcagtatagttaaaagaatgaagaaaagaggtgtactaactgaaaagaatgcaaatgaccccgaaaacgttggggaacgtagtgacttatccagcgataggaaaatgctacaagaaagctctgaagaggaatccgatacttacggagaaattggtttatccaagtcagaggctatatttcactggagaaacctttgttacgaagttcagattaaggccgaaacaagacgtattttgaacaatgttgatggttgggttaaaccaggtactttaacagctttaatgggtgcttcaggtgctggtaaaaccacacttctggattgtttggccgaaagggttaccatgggtgttataactggtgatatcttggtcaatggtattccccgtgataaatctttcccaagatccattggttattgtcagcaacaagatttgcatttgaaaactgccactgtgagggagtcattgagattttctgcttacctacgtcaaccagctgaagtttccattgaagaaaagaacagatatgttgaagaagttattaaaattcttgaaatggaaaaatatgctgatgctgttgttggtgttgctggtgaaggtttaaacgttgaacaaagaaaaagattaaccattggtgttgaattaactgccaaaccaaaactgttggtctttttagatgaacctacttctggtttggattctcaaactgcttggtctatttgtcagctaatgaaaaagttggcaaatcatggtcaagcaattctatgtactattcaccaaccctctgctattttgatgcaagaattcgatcgtttactatttatgcaacgtggtggtaagactgtctactttggcgacttgggcgaaggttgtaaaactatgatcgattattttgaaagccatggtgctcataaatgccctgctgacgccaacccagctgaatggatgctagaagttgttggtgcagctccaggctctcatgcaaatcaagattattacgaagtttggaggaattctgaagagtacagggccgttcaatctgaattagattggatggaaagagaattaccaaagaaaggttcgataactgcagctgaggacaaacacgaattttcacaatcaattatttatcaaacaaaattggtcagtattcgtctattccagcaatattggagatctccagattatttatggtcgaagtttattttaactattttcaatcaattgttcatcggtttcactttcttcaaagcaggaacctcgctacagggtttacaaaatcaaatgttggctgtgttcatgtttacggttattttcaatcctattctacaacaatacctaccatcttttgtccagcaaagagatttgtatgaggccagggaacgcccctcaaggactttttcttggatttcatttatcttcgctcaaatattcgtggaagttccatggaatatattggcaggtactattgcttattttatctactattatccaattggattttactccaacgcgtctgcagctggccagttgcatgaaaggggtgctttattttggttgttctcttgtgctttctacgtttatgttggttctatgggtctgcttgtcatttcattcaaccaagttgcagaaagtgcagctaacttagcctctttgttgtttacaatgtctttgtctttttgtggtgttatgactaccccaagtgccatgcctagattttggatattcatgtacagggtttcacctttgacttatttcattcaggctctgttggctgttggtgttgctaacgtagacgtcaaatgcgctgattacgaattgctagaattcacaccaccatccggtatgacatgtgggcagtacatggaaccatatttacaactagcaaagactggttacttaactgatgaaaatgccactgacacctgtagtttctgtcaaatatctacaaccaatgattacttagctaatgtcaattctttctacagtgagagatggagaaattatggtatcttcatctgttatattgcattcaattatatcgctggtgtctttttctactggttagcaagagtgcctaaaaagaacggtaaactctccaagaaataatagaattttgaatttggttaagaaaagaaacttaccaagatggacttttttaataaacatacataatcactacatataggtgcgtaataataagtttttattttttttttcttaattcagcgagctttctacatttcaattttcttgaatttaccagctctgataaatcaaagttcaatgtccgaaagaattccgagaattttattcctaggttatctcatcggtactttttttttataggcatcagcatttagtgtgaaaacattatttcttaactgtgccttacggttaaaaagaaaggacgcaatggatatagttaaaatataagatatattatatcattatctgtccga

SEQ ID NO: 26 - DNA, 1977 bp, Arabidopsis thaliana
  CDS (85)..(1857)
ctcaaacaaaacagccttttacataagaacaaacacccccaaaaactgcaaaaaaaagagagagatcattaatccatcttcaagatgtctcttcctgaaactaaatctgatgatatccttcttgatgcttgggacttccaaggccgtcccgccgatcgctcaaaaaccggcggctgggccagcgccgccatgattctttgtattgaggccgtggagaggctgacgacgttaggtatcggagttaatctggtgacgtatttgacgggaactatgcatttaggcaatgcaactgcggctaacaccgttaccaatttcctcggaacttctttcatgctctgtctcctcggtggcttcatcgccgatacctttctcggcaggtacctaacgattgctatattcgccgcaatccaagccacgggtgtttcaatcttaactctatcaacaatcataccgggacttcgaccaccaagatgcaatccaacaacgtcgtctcactgcgaacaagcaagtggaatacaactgacggtcctatacttagccttatacctcaccgctctaggaacgggaggcgtgaaggctagtgtctcgggtttcgggtcggaccaattcgatgagaccgaaccaaaagaacgatcgaaaatgacatatttcttcaaccgtttcttcttttgtatcaacgttggctctcttttagctgtgacggtccttgtctacgtacaagacgatgttggacgcaaatggggctatggaatttgcgcgtttgcgatcgtgcttgcactcagcgttttcttggccggaacaaaccgctaccgtttcaagaagttgatcggtagcccgatgacgcaggttgctgcggttatcgtggcggcgtggaggaataggaagctcgagctgccggcagatccgtcctatctctacgatgtggatgatattattgcggcggaaggttcgatgaagggtaaacaaaagctgccacacactgaacaattccgttcattagataaggcagcaataagggatcaggaagcgggagttacctcgaatgtattcaacaagtggacactctcaacactaacagatgttgaggaagtgaaacaaatcgtgcgaatgttaccaatttgggcaacatgcatcctcttctggaccgtccacgctcaattaacgacattatcagtcgcacaatccgagacattggaccgttccatcgggagcttcgagatccctccagcatcgatggcagtcttctacgtcggtggcctcctcctaaccaccgccgtctatgaccgcgtcgccattcgtctatgcaaaaagctattcaactacccccatggtctaagaccgcttcaacggatcggtttggggcttttcttcggatcaatggctatggctgtggctgctttggtcgagctcaaacgtcttagaactgcacacgctcatggtccaacagtcaaaacgcttcctctagggttttatctactcatcccacaatatcttattgtcggtatcggcgaagcgttaatctacacaggacagttagatttcttcttgagagagtgccctaaaggtatgaaagggatgagcacgggtctattgttgagcacattggcattaggctttttcttcagctcggttctcgtgacaatcgtcgagaaattcaccgggaaagctcatccatggattgccgatgatctcaacaagggccgtctttacaatttctactggcttgtggccgtacttgttgccttgaacttcctcattttcctagttttctccaagtggtacgtttacaaggaaaaaagactagctgaggtggggattgagttggatgatgagccgagtattccaatgggtcattgatcatgaattcatgatcatgatcatgatgatgaacattatgcatgtctatgttgatatgtttgaatttgattttgagttttgtttgtatattttatgatgcttttcttaattaaaaaaaaa

SEQ ID NO: 27 - DNA, 1965 bp, Oryza sativa
  CDS (144)..(1898)
ggtggaggagagtgaggacggcccacgcggacgagcagagagtggcgggctcagtgtcgggctcgccggagtccgcgcaatccggccgttcatgcttcattctctcggacattaacctggtttacttgtaagaaagtagagccatggactcctcataccagcatgacaagcctctgctggatgaagagaactcctcgcaagtgacccttgaatatacaggtgatggatctgtttgcatccgtgggcatcctgctttaaggaaacatacagggaactggaagggttcctcattagccatcgttttttcattctgctcttatctggcctttacttcaattgtaaaaaacctagtcagttatctcacaaaagttctacatgaaacaaacgtggccgctgcaagagatgttgcaacttggtcaggaacaagttatcttgcacctctggttggagccttcttagctgattcatatctggggaagtactgtacaattctgatcttctgcacgatcttcattatcggattgatgatgttgcttctgtcagcagcagttccattaatctctactggtcctcactcatggatcatatggacagatccagtctcttctcagaacatcatattctttgtcggtttgtacatggttgctttagggtatggtgcacagtgcccctgcatatcatcatttggtgctgatcaatttgatgacactgatgaaaatgagagaacaaaaaagagttcttttttcaattggacctatttcgtagccaatgcgggctcattgatctcggggactgttattgtgtgggtgcaagatcacaaaggttggatctggggttttaccatttctgcactatttgtgtatttaggttttggtacttttatctttggctcctctatgtatgatttcagaaacctggaggaagcccctcttgcgagaatatgccaggttgttgttgctgctattcacaaacgcgataaagatttgccatgtgattcctcagttctttatgagtttctggggcagagttcagcaatcgaaggcagccgaaaattggagcatacaactggacttaagttctttgatagagctgcaatggtgacaccatctgattttgaatctgatggcctactaaacacatggaagatttgcacagtcactcaagtggaggaactgaagattttgatcaggatgttccccgtttgggcaacgatgatattatttgctgcagttctggacaacatgttttcgacattcatagaacaggggatggtgatggagaaacacatcggctctttcgaaatacctgcggcgtccttccaatccattgatgtcattgctgtccttatactagttccagtctatgaaagagtccttgttccagtgttcagaaaattcactggcagagcaaatggcattactccactgcagcgaatggggatcggcctgttcttttccatgctctccatggtatcagcagcattggtggagagtaatcggttgcggattgcgcaggatgaaggtttggtgcacaggaaggtggctgttccaatgagcatcctgtggcagggaccccagtacttcctgataggcgtgggagaggtgttctcaaacattgggttaactgaatttttctaccaggaatcaccggacgccatgagaagcttatgtctcgcattctcacttgctaacgtttcggcaggaagttacctcagctcgtttatcgtttctcttgtgccagtgttcacagccagagaaggcagtcctggatggatacctgataacttgaacgaagggcatttggatcggttcttctggatgatggctggcttgtgtttcttgaatatgctggcctttgtgttctgtgccatgaggtacaaatgtaagaaggcttcctgaaccttgttaacattagcaatataatggtggtggaaaaggacaattgtgttgcaaaaaaaaaaaaaaa

SEQ ID NO: 28 - DNA, 901 bp, Synechocystis PCC6803
  CDS (70)..(801)
ctatgagcagcagggctcaccagaggcgcaacggctagaactgcggctgcaagccatgggaattcggctatgacgggcaaagtctatctcgtcggcgctgggccgggcgaccctgaatatctgacgctgcaggcacagcaatgtttgcagtcagcagaggtgttgatctacgacgcgctgatcgacccccgaattctcgacttagtgccagctaattgcgatcgcattgccgtgggtaaacgcggtggcgcggagagtacgccgcaagccactatcaatcaactactggtcgagcactgccagcaagggcgcaaagtcatccgcctcaaaagtggcgatccctttgtctttggtcgcgctgccagtgaattggatgcgctggagcgatcgggctgtgattatgctgtcctgcccgggctttcgaccgctttagcggctccactgttggcgggcattccgattaccgatccggtgctgagccgtggctttgcggtttacaccgtccatgagccagacgcgttgaattgggaagcgctggcgcaactggaaacgctgattctgctgatgggtagtcgccacttgctgacgattggccacgagctgattcggcatgggcgatcgccggatagtcctgtggcgctgattcagtgggccggacatccacagcagaccgttttggaaagtagcctcagccgcatggcgcagcagtggggcgatcagccgttatcgccctgcgtaattgtgattggcgaggtggtacggttgcgaaagtactgggcgcactaccgttacgatggctgagcagccgctgatcggtaaaaccattttgacgacgcgagccgcggggcaatcttcgccctttgccgcacaactgcgggccgctggcgcagccgtgatcgag

SEQ ID NO: 29 - DNA, 1985 bp, Xylella fastidiosa
  CDS (82)..(1509)
tattttccaactgcctgaagtcatttcctgagactatcaaccaggcactacggtcatgatccccaacctcaactcactatcgtgactgccaacgttctgttccccttattcgccaacctacacgaccgcgccgtcctggtggtcggcggcggtaaggttgccgaacgcaagacagaggcattactcaaagtgggcgccttgccgattatcggtgccccctctctgaccgcatcgttacagcactgggccgaaaccggccgcatcacctggcggcaagggacgtttgaaaacagctggctgcaagaagatatttggttggtcatcgccgccaccgatcaacccgaggtgaaccacgccgcggcgcgcgcagcacatgcgcaacggctattcgtcaacgtggtcgacgacattgcactctccaacgtgcaggtgccggccgtggtcgaacgcggcccgttgcggatcgcgatttctagcggcggtggcgcaccgatggtggcacgctatctgcgacaacaactggaaagcctcattgacgatagttggggacgactgaccacactgttcgcgcaacgccgcgacaccatccgcgcccgctatccaaacatagaagcacgccgccggttctttgaaacccaactcaccggcccactccaacgactgctacgcaagcaacgccacgcagaggccgaagcagtgctggaagcagcactcgccgagactccccccacggggtccggcagcgtcaccctggtgggcgctggcgccggcgacgccgggctactgaccttaaatgcactgcgcgccttgaatgaagccgacatcatcctctacgaccgcttggtcagcgacaccgtgttacaggtggcacggcgcgatgcggagcagatcgaagtaggcaaatccgcgacaggccacagtgtgcgccaagaagacattcacagcctgatgctgcaacacgcccgtgctggccagcgtgtcgtacggctgaaaggtggcgatccattcgtcttcggtcgtggcggcgaagaactggaatttttacgtacccacaacatcccctatgaggtcatccccggaatcactgccgccctggcctgtgccgcctatgccggtatccccttgacccaccgcgaccatgcccaatcgctatgcctgatcaccgcccattgccaatcctcgctagacaccctggactgggctgcactagcacaagaacgccaaacgctggcgttctacatgggcgtggcggggctacccaccatccagcaacgcctgtgtgaggctggacgcgccgaaacaacgccttttgcactgatcgaaaatggcgcacgcgcgcaacagcgggtgctcaccggaacgctgaaaacactcgcgcacaccgcacagacatatgccgtgcgcccccccgcactgctgatcctcggcgaagtcaccacgctggccgaacacctgcattggttcggcaccgcaccattatctgccccatgcccccccgcactcatcctataagctgattcaaagacacacgtatctgtgtgtacatcctccctgattacttccacagagaccttcatgactatctacaacactatcctggacacgattggccacacacccgtggttaaactgaaccgtattgctccggcacacgtggatctgtacatcaaggttgaatcattcaatccaagcggctcggtcaaagaccgtctggcactggccattattctcgacgccgaacaacaggggttattgaaacccggcgacaccatcgttgaagccacttcgggaaatactggcgtcgccctggccatgatcgccgctgcccgcggctacacgtttgtcgccaccatggtcgaaaccttttcgatcgagcggcgcaaactgatgcgcgcttacggtgccaaagtcatcctcaccccagccgccgaacgcggtagcggcatggtacgcaaagccaaagaactcgccgaacagcacggctg

SEQ ID NO: 30 - DNA, 1637 bp, Zea mays
  CDS (15)..(1286)
ccccgcgcatcgccatggctctcgccgtccgcacgcctcgcttccagcctcgaccggcctccatttctgcgcccacaacacccgcatcgacctccctcgccgccgggaacgcgaggccccgcccctgcgccggcgccgccgttcgcgcctcgcccttcaccgaggccacctcctcctcgcgctaccgccgcgacgcctggtcatacgccgccgatggctcctccaactccgcatccccgtcctccgctgccgctgctgccgcgggccgtcgggatgacgagatcgcgctgcagctgccggaactgcggaggctcctggacgtgctgagggcgtccagggggaggggcgccgaggagggcggcggacccggggaggtggcactggtgggcacagggcccggggaccccgagctgctcacgctcaaggcggtccgggccatcgaggcggcggacctggtgctctacgacaggctggtgtctaacgacgtgttggacttggtcggggagggcgccaggctgctctatgtcggcaagaccgcgggataccacagccgcacccaggaggagattcacgagctgctgctgagctttgcggaggccggtgccaatgttgtgcgcttgaaaggtggcgatcctctggtttttggaaggggtggagaagagatggatttcttacagcaacagggaattaaagttgaagttatcccaggaattacttctgcttcgggtattgcagcagagctaggcattccgttaacccatagaggtgttgctaccagtgtcagatttttaactggccactccagaaatggtgggacagatccactatatgtagctggaaatgcggctgatccagacactactttggttgtgtatatgggtttgtcaacacttccatcacttgctccaaagttaatgaagcacggcctgccaccagatacccctgctgttgcagtagagcgcgggactacaccccaacaacgaacggtgttcgcctcgttgaaggatcttgtggatgaagtcaagtcagccgatctagtttctccaactctaataattattgggaaagtggtatccttgtcacccttctgggttgagtcatctgaacatgatgcactgaaagttcagagctcgtatgcaaatgaggcagatgacaacagattttcttggtttttagtgactggacaatacttgagaaatgcaagatcccagatatgggagcacaggttcgacctggtgtacacagaaacatctcaggaagcatggatcctgaatggcggatggtagcttaagcttataacagacttggggcagaagcgcacttggactgatcatgcttgattctttggcctaatctacatgagattcacaatttttcgatttagttgagttcgacaatagttgtgtgcttctttgttactagtagccatgtacgtgcggcgcagcggtgtttacgattctatgccctagcatagtaaggctattccaacgctgccacgttatgattttatgataatgggagtttcgtagcaccatgataatgagaaatagtgctacgaagctcttattatatgacaagtgccataaatcgtagcacttatgattttatgatatggggagcttcgtagagctctttct

SEQ ID NO: 31 - DNA, 1052 bp, Zea mays
  CDS (171)..(755)
ccacgcgtccgctgttcgaagctttcagccgagcaccatcgtcacagtcagtagccaagcatatttctttctccgagtgatttgcgctgagcgatcagttcatccagagcgagcggagctgagctgagctgagctgagcgagcttgcgttgcttgagagaccctgctgccatggcttcccaccaggacaaggctagctaccaggccggcgagaccaaggcccgcaccgaggagaagaccgggcaggcggtgggggcgaccaaggacacggcgcagcacgccaaggaccgggcggcggacgcggcggggcacgcggcgggcaagggccaggacgccaaggaggccaccaagcagaaggcgtccgacaccggcggctacctgggaaagaagaccgacgaggccaagcacaaggccggcgagacgacggaggccaccaagcagaaggccagcgagacgacggaggcgaccaagcagaaggccggcgagacgacggaggccgccaggcagaaggcagccgacgccatggaggcagccaagcagaaggccgccgaggccgggcagtacgccaaggacaccgccgtctccggcaaggacaagtccagcggcgtcatccagcaggccactgagcaggtgaagagcgcggcggcgggcgccaaggacgcggtgatgagcacgctggggatgggcggggacgacaagcagggcgacgccaacaccaacaccaacaaggactcctctaccatcaccagggatcactagacgcgtgtatgcacacgcacttggtccgatcctgtcgtccgtgaccctgtttgcttgttcgcgagtccagtatgggtttgtgcatgttttcagtgtcatggtttccttttctacgaatttggcgttgtaagttcgattcgcaggtacgttgctgtgttttttttctgcgccatcaggtgtctgtaaacgagtcgggcgggtttgagtgtcctttgttgtgataataaagttggtaaatcgtaattaatatatagcatgcgactgtcttgctatggcctaaaaaaaaaaaaaaag

SEQ ID NO: 32 - DNA, 834 bp, Zea mays
  CDS (70)..(456)
ccacgcgtccggaataatctcttcttcacctcactaacaccagctagcaactctttctctcctgcaataatggccgctcgctcctcctcctcccagccgcagctggtcgcggcggcggcggtcctggcagcggcgctgctgctgctggcggcgggggccgggacggcgtcggcggcggtgagctgcggcgaggtgacgtcgtcggtggcgccgtgcctcgggtacgcgatgggcagcgcggcgtcgccctccgcggcgtgctgcagcggggtgcgctcgctcaacagccgcgcgtcgtcggcggcggaccggcaggccacctgcaactgcctcaagagcatgacgggccggctcggcggcggcgtcagcatggccaacgccgccaacatccccggcaagtgcggcgtctccgtcggcgtgcccatcagccccaccgtcgactgcaccaagatcaactgatcgatggaaccatagtggaggtagctcgctcgttggatggcagcgtacgtggccatcagcagcatgcagtcgtcgtcgtagcagagatgtcctagctacgtgtgtgtcatgcatcagactggcacataataaagaagtagatcatgcacccactagtgatcacttcgtctagtgtccctccgttcaatgtcgtcgtcgtcgtcgtgtaccttacgtgacatgctgtagcacgtacgctagcagagcagcacctcaatgtccttgggtttgctttgctggctctctgttttcgtcttgtgttgcttttaatctggcacaggtttctaaattataataatgaatacttttttgtccattaaaaaaaaaaaaaaaaag

SEQ ID NO: 33 - DNA, 1050 bp, Glycine max
  CDS (6)..(704)
cagccatgttcttaaccagaagcgcgctttttcgcttttcaaagtctctcccttatgccccttcactctcccttaaaccctccatggtcaccttctcctctactcccaattcaggctggagaaatgcagcagaaggaggaagaagagacggaagaaccaattggacgtatgattctgccgaggcaagacgcgaggcagatgaaatgtctgagagtgccaaagaaacgatgaatgaaggctatgacagggccaaggatcaagcgcgggaagccaaagacagaacaaaggatttcgcacacgacgcaaaggagaagacaaatcagcctcaaagtcaccaggtatctacaattctgccactgctgacaacaaaaccggttccaaggtcggagagtacgcagattatggttctcagaaggcgaaagaaacaaaagatgcaacgaaggaaaaagctggagagtacacagattatgcttcgcagaaggcgaaggaaacgaaggacaagacaatggaaaaggctggagagtacactgattatgcttcgcagaaggcgaaggaaacgaaggacaagacaatggagaaggctggagagtacacagattatgcttcgcagaaggcgaaagaagccaaggacaagacaatggagaagggaggggaatataaagactatgctgcagagaaggctaaagaaggaaaagatgctactgtgaataagatgggagagtataaagattatacggcggagaaggctaaagaggggaaagatacgacgttggggaagcttggggagctgaaggactctgcggctgatgcggcgaagagggcagtgggttacttgagcggcaagacagaggaaaccaaagagaaagtctcggagacggcagaggcgacggctaataaggcggcggagatgaaggaggccaccagggagaaggctgccgggactgcggaggcggccaagaacaaggccgcagaggtaaaggacagagctgcagaaaccgcggaggcggccaagaacaagactgccgagactgctgaggcagcgaagcagaa

SEQ ID NO: 34 - DNA, 1378 bp, Glycine max
  CDS (33)..(710)
gtacttccttacaatcaaaaccaacaacaactatggcaagttatcaaaagcactacgatgatcagggtcgcaaggttgacgagtatggcaacgttgagaagcaaaccgacgaatacggcaaccctgttcatgctgctagtgtcacctatgtagccaccagaactgctgctggtggttacagtgatgacattaataagcaacatgataccaccaatgcctacggcgtagacactggtagacagcattctagtggtggctacgatggtgacactaataaacatcatggaactactggtggctataatgatgacaccaatagacatcatggaactaccggtgtctatggtatagacaccgataggcaacaacatgggactactggtggctatgccggtgacactggtaggcaacatgggaacatcggtggcccttactatggaaccaacaccgcagacaccggtactggtcccagaagtggaaccacgggcggcaccggttatggaggcactggtggcactgattatggaacaactggtggcactggttatggaagtggaactgggtatggagtcaacactgggggtgcgcacactgaagcaggatataggaaggaacatcgtcagcatgaccaatctcatggtgatcagaacgagaagaaagggattatggacaagattaaggagaagcttcctggaggacacagtgacaagtagatgcatcgtgcatcatgcatgcatgcatatatataatattgttgtctttgaataaatttgctgcatatgtacttacgtacgtacagtgtcttgtcatgtatgtggaggatatagtatatggttatagtttatgtagaagaataaaaaatgtatgcatgtagtaatgtaagggtcttatatatgtggctgaaatataaaccataataaaggcagagatgttgtgccaaaaaaaaaaaaaaaaaaaaaaaaaaaaaaaaaaaaaaaaaaaaaaaaaaaaaaaaaaaaaaaaaaaaaaaaaaaaaaaaaaaaaaaaaaaaaaaaaaaaaaaaaaaaaaaaaaaaaaagggggggccccccccttaagaattttcccccccggaaattaatttcggaccgggccctgggggggacccaattttcccttatgggggggctataaaaacttggggaaaaaaggggaaaaaatttttcccggggaaaaatgttttcccgtaaaaattccccaaaaaaaaaaaaccgaaaacaaaaaagggaaaaccccggggggcctaagggggggcccaacccaactaattgggttggcccaactggcccttttcaaggggaaaaactttgggccctcttctttaatgaatgcccaaccccggggaaaagcgttttccttt

SEQ ID NO: 35 - DNA, 856 bp, Zea mays
  CDS (91)..(558)
attcggctcgagggcttctcctccccctccggttcgggttcgggttcgtgaggttctccggggttcggtttcgtgggtgggcggatcgagatggcggcgtcggatgttgagtaccgctgcttcgtcggcggcctcgcctgggccacggacgaccactccctccacaacgccttcagcacctacggcgaggtcctcgagtccaagatcatcctcgatcgggagacgcagaggtcccgcggcttcggcttcgtcaccttctccacggaggaggcgatgcggaacgccatcgagggcatgaacggcaaggagctggacggccgcaacatcaccgtcaacgaggcccagtcccgcggcggccgtggaggcggcggcggcggctacggtggtggccgtggaggcggcggctacggcggtggcgggcgccgtgatggcggcggcggctacggcggtggcggcggcggctacggtggcggcggtggctacggtggtggtggtggcggctacggcggtggcaaccgtggcggcggctacggcaactccgacgggaactggaggaactgagcggtggggcccgcgcggccaagttatcctgttcgctaccgtgatgtttaccctagtccagagggtttatcttcgttcgtctcgtttgttgttgcccatctgtgtttttgattgcaaggtcgctctgtgtcagttgttagtgctgcgttcatcctcggctccagcagacccatgcatcaaccagcatggactgtggatcgatggatgctgttactcctgtcaggatttgttctaagttaatcctaaggaaaaaatggtgcttcttggtgctgcaaaaaaaaaaaaaaaaaaaagg

SEQ ID NO: 36 - DNA, 839 bp, Zea mays
  CDS (84)..(584)
ccacgcgtccgcacgatcgagcacacaaccacgaagactcgtttattaggagaaaccacaaaccaccaagccgtgcaagcatcatggagtacggtcagcaggggcagcgcggccacggcgccacgggccatgtcgaccagtacggcaacccagtcgggggcgtcgagcacggcaccggcggcatgaggcacggcacgggaaccggcggcatgggccagctgggtgagcacggcggcgctggcatgggtggcgggcagttccagcctgcgagggaggagcacaagaccggcggcatcctgcatcgctccggcagctccagctccagctcgtcggaggacgacggcatgggcggaaggaggaagaagggaatcaaggagaagatcaaagagaagctgcccggaggccacaaggacgaccagcacgccacggcgacgaccggcggcgcctacgggcagcagggacacaccggcagcgcctacgggcagcagggacacaccggcggcgcctacgccaccggcaccgagggcaccggcgagaagaaaggcattatggacaagatcaaggagaagctgcccggacagcactgagcggcgcctatacacgtggctgtgctttgctggcgcgtcaaagccgtaatgttcagtgtttcatagataataagataaacccatgaataagtgtcctacccttgatcatgtgacagggacagggacagtttcctgtacttgtggggtgaatttgtacgtgtgatacggtaactgggtccgtgtactgtttatgctacgttttccatacttaaaagtacgtatatataaaaaaaaaaaaaaaaaaaaaaaaag

SEQ ID NO: 37 - DNA, 1341 bp, Zea mays
  CDS (98)..(967)
cactgaagaagccagtcaatagcgagttctactactagtagctagcctgctgatctgttctgttgtttagttcgcaaagccttctgtttcggcgaccatggaggatgagaggaacacccagcagcaccagggcggtgaggcccagcaggacgccgccgatcaggtggacgtgaaggatagggggctcctggacagccttctcggcaggaagaagcacgacgacgaccaggagaagaagaagcagacggatgagctggcgaccggcatggagaaggtcacggtgtccgagcccgagaagcacgggcacaaggaggaggagcacgaggtcgtcggcgagaagaaggagggccttctcgccaagctgcaccgcaccagttccagctccagctcgtcgagcgacgaggaagaggaggcgatcgatgagaacggcgagattatcaagaggaagaagaagaagatgggcctcaaggagaagctcaaggagaagctgccgggccacaaggacggccaccacacggccgcaccgtccccggcgcccgcgcccgtggagacgcatgcccaccaccaggaggaagcgcacaggccgcacgtcgtcccgaccccggccccgccgcctccaccgcacgtccaccagcacgaccacggcgtcgtcgtccaggacgacgtgaagaccgggaccccgccgcatgcaccggaggaggagaagaaaggcctgctggacaagatcaaggagaagctccccggtggccacaacaagaagcctgaagccgctgccgctgccgcaccggctccgcccgtccacgcgccggcgccggcgccgcaggcggagaacgtgagcagcccggatggcaaggagaagaagggcttgctgggcaagatcatggacaagatacccggctaccacaagagctcagctgaggaagcagaccacaaggcggacgccgccggcgagcacaggaccagctcctaaggtcgcagtcgcagcgcgtgtcctggccgtggccgggccttgggcgatcagaaggtagctagcgttggcatgtgggttcggttctggtttgcttttaccaaaagtttgtttcaaggtggatcgcctggtcaaggtccgtgtgctttttaaggtggatcgcgtgactggcagtgagtgttgctgcttgtgtaggacgtggtacgtacgggttttattttggttccaagtcaaaagtcacggtcggtctggatgttgtgtactgggtttgttgaattatgagcagctgcgcgttgtaattcggctgggctacctggatgcgttaataattgctttggtttctgcccaaaaaaaaaaaaaaaaaaaaaaaaaaa

SEQ ID NO: 38 - DNA, 2073 bp, Saccharomyces cerevisiae
  CDS (1024)..(1527)
gattgtgttacacgctctatcttctttctcacaccttccttcttctacttccggagtatagtctctagcttatccttgatggctctttttatgcaggcagaataattacagtgacgtatttgtggcttctttggcacaacgttttgttccacgatcacctcatatcaccgttaagttcttcatcgtccaattccggagttccccgtcagccgtgcgaccatgtggtatttcacccgaataattaagggaaaacagaaggagaattacgtatcttaaaggagctagactctttgcctcattgaggctttctatacatcgggtccccatgtatggtccgttccatagtcgaagcatccttaatttcctgtgacattacagtagtttcgccgtagagcctttcacgggaagaatatgttcagtggttccaggtatgggtttgaggatgttcttgtaaggtgtgtagatcccatcttttttagggatcacaaagggaaaataactacacagcatgtggtggtacagatgaggtcaatggcagttttgccttagttgtaagtaattaaccaatccttgtcgtgcttctcatgaatgtgtatgaatttatgttcatcagaatatccctctttaaccacagttcttgcgtaaagcatagtctggcttcctttagaaaaaggaaatgtggtaattctaggaccacgttttgggcttcgtcatttcttttcactcctccacttttatgacatttgatcgcaagttcctccatacatcatgcctagtaatcaaaacaaataacgcacaagggagtaaagggaaatggttagaaaagaccgaaatcctttttttggtctccgttacgtgcttgttaatcaggctcccttgaagcagtcaatatttcttggactataaaagcacattactatttcatcaaaaaaaggatacatacctaccctcaactcttaatatctactagcagcagagccaaacactaccgcataaaagctaagtacgaataacaattaagaaatgtccaatctattaaacaagtttgctgataagttgcacggcaacgatcatgatgaacgttacgaagacgacaatgacgaccagactagacaacagcgtcatgaaaaacatcaacagagggaattcaggaatcaaggatccaaggccgatccctacggcgaagaaaaccaagggaatttccctcaacgccagcagccacagtctaatctaggcggtaacacgcagtttggcggtaacgacttccagcaacaaactactgactacactgccggcactggtggtggcacttatacccaaacttaccgcgaaactaacactcaaggtcagttggacgacgatgaagacgatgacttcttgacttcgggccaacagcaaaaacaaggtcgtacaagaggtgctcaaagtaaccgctaccaatcctctaatatcggcagcggtagacgcgatctgtctgggtcaggaaacgatgaatatgatgatgatagtgggaaccaaggcgtctggtagatgcggtggtcgaagcttctattacatgcctgaggtgcgggtctcacccttgagcagcaagtgagaaattttaccctaatttcgtcttcttttttcttttttcttcatctggacctattattggtcatgatgccactttttacaaactatttcatatgtttaatctagtttatttagatctacagctgtcagtttatacgtttttattaatgtcagtttgatttgattagtagtgacctttttcgtcgaggtatgccgtttcacggacctccagatccaggtgtataacaatagaattatgggaaaacggggtgggaaggtcgttgtctaactcaaacctcctggaattagcgggtaaagtgtcgttattgtgctgggcaacaacttttttttacgatttctttttacctctcatctaggttagtgttagttgtaaaaacccgagcagattggtgccttttcaagtgcgttcttacaaccatacttttttattctagaacgtgtaagcaattactttctcaaaaaagcaaacgcaataaagat

SEQ ID NO: 39 - DNA, 1106 bp, Saccharomyces cerevisiae
  CDS (683)..(934)
aatatgcctgtaaaaactatgtaatatatcacaagtaacaacatttcatcaccattactaccattatgtagaaatttatgagcaaagacaaataagtaaagaaaaagacattgatataatataagagtatgctttcttcattttaatgtttggttgtgaattgaaagaataccattcgggcacgcaatagttatgaacttaaccgagctcaaataatttaaagataaaagataaaagataaaagataaaagacaaaagaaaattcatagcccatgttgaagtatcccagcgggaaatgttgctatccaacagaaagtaccaagccagtttcaaaaaggtacagaattaagtgatgctatccgtcccacaactaattttctccagcggaggaaatatacgcggagggggggaggaaaacctctcagtaagcaatgaagggatagataatgggggcgcgcctgcctagcttaggctaagaaactccttcgaaaacagggggctgcgagcgcagaagcgaacacttgtcatttgtataaaaggactatttataagtttgctttttgtcactctcttggccctaattacccatactattgtaacaattgttgtgtaaactcaattatacaaataaacgaacaatcaacagtaacaaaccgctcaagtgtacaaccaatcagaaaaaatgacgagaacaaacaagtggaccgaacgtgaaggaaaggctgatccaaagtacttttcgcacactggtaactacggtgaatctccaaatcacatcaagaagcaaggttccggcaagggtaattggggtaagccaggcgatgagattgatgacttaattgataatggtgaaatacccccagtgttcaagaaagatagaagaggctcaaatttgcaatcgcatgaacaaaagtttgaaaacgtccaaaaggaatgagggcgttttcaagataaaaaaaggttttttgatctctgaaggatagtggccttctccactgatttatatgcatctataggtatatacttgcatgcctacttcatgacttatgtaatacagttttcttacatccatttaatttacgttcgaagaagttttcaacatttgt

SEQ ID NO: 40 - DNA, 1042 bp, Saccharomyces cerevisiae
  CDS (376)..(855)
ggtacccctttaagacaactatctcttaaccttctgtatttacttgcatgttacgttgagtctcattggaggtttgcatcatatgtttaggtttttttggaaacgtggacggctcatagtgattggtaaatgggagttacgaataaacgtatcttaaagggagcggtatgtaaaatggatagatgatcatgaatacagtacgaggtgtaaagaatgatgggactgagagggcaattatcatccctcagaatcaacatcacaaacatatataaagctcccaattctgccccaaagttttgtcctacggcatttttcaatctttcgttatctgtgctctttactttagtagaaaggatataaaaaagtatagtcaagatgtctaacatgatgaataagttcgctgaaaaattacaaggtaacgatgattcccatcagaagggaaagaacgccaaatcctccaacaaggaaagggatgatatgaacatggacatgggtatgggtcatgatcagtcgaagggaatgaagatgggccatgatcaatctggaacaaagatgaacgctggcagaggaattgcgaacgattggaagacttacgaacatgaaaatatgtacgtttttggcgcattaaccaagtcctcttatttttttaatggtttatttatgaattgtttatgtttatgttctttatactcaaaatcaataagtgcttattttagcgaattttcttctacgaatatatataagtcatatctaagacttccatccgtgctttattacgtttgtatgatgcatacaatgatgccaaatcagcttgatgctgttggtattcagtcgtccgaaagcctgttgatgtgacactcaaatcttcggcatgtgtgaacggtggccgagcatagttcgtgaacatcatcacttaaaataagaactacactttacatcagcgtggaagataaaggttgttttaagctcaagggcgctggaggtgtagcgcttcggaggaaaataatattgaataacttcgctttttgttccaaattctaga

SEQ ID NO: 41 - DNA, 1446 bp, Saccharomyces cerevisiae
  CDS (744)..(1130)
actgaaaatataattttactgacctacctacactgatttgtctcgaagtagatatgataccttgagcagcacgaggatattaaaaagtagggcaattctgcttttaacgtataagcaacaccaagtacacgtaatttattttgatgattcttctatattttttttttcttcattgttattttttcactatctttttcatccctccgcaaaaggacgcgatccttttttagcacgtgaacggtaataacgggtcctggacgatgtattagagtcacctaatcaccaagcgagccaatggcgactcacttgacttgcatgtttgcataacctatttagcgaaccctccaacttctgagcgcaccagcttaacttgtgcgctaagctgccttgcccgacatagtgccatcgctcattccacctcacacctgattaactaaaagttttaaaactacgggactgcgaaaaagtagagctacgttactgcagacctacaataattgcacacatcggcctgataacgaatgcttctaaaattctactgtgctactatcggctggtcgcgcccgacgggttcgctcagccgctctgcgccctcttactcttcagccattctgctgcggccgaagctataaaagtatgtcaatttggctttttccaaaatccccctctggctctttctcttctcaagacaagcattgaagagactcactagtaagcttaagatagtcctacacacaaccaccatgtctgctaacgattactacggcggaaccgccggcgagaagagccaatattcccgtccctccaacccgccaccttcatccgctcatcagaacaaaactcaggagcgtggatacccaccccaacaacagcagcagtactaccagcagcagcagcagcatcccggatactataaccaacaaggatacaatcagcaagggtacaatcagcaagggtacaatcagcagggctacaatcagcagggatataaccagcagggatataaccaacaaggccatcaacaaccagtctacgtccaacaacaaccaccccagaggggtaacgaaggttgtctggctgcatgtctggctgcattatgtatatgctgcaccatggatatgctattctaagagaacccgcaaaagtattcaagaatgaaaaaaaaaaaaagaataatctccccttctgttctttgcagttgcctttcttcccctcagtgttattttttttcacaaggagataaaaaaaaaaactttaacatgtcactttaagcatgtatgtaatacgtctattaattatatgtaacttttataactattttcatttctatgtgatccatttgcagttatgcaccttttttttttttccgaattgtgctatgtatatatcactagtaataatgtaccaaactatacaaacacgtaggatacagtaaaaaaaatttta

SEQ ID NO: 42 - DNA, 665 bp, Saccharomyces cerevisiae
  CDS (282)..(611)
cccacaaacacagaccagaagcactctagacggagagtaactagatgtacagcccctggaaaatcgttggtcaactttgaggttccggtcgtccccctcttgatctgaaaggtctttctctaaatctatattaaaacgtataaataggacggtgaattgcgttctacttcctcaattgcgtttgatcttatttaatctctctctatatatagaaaaaaaaaccatctgttattcgataatctcaaacaaacaactcaaaacaaaaaaaactaaatacaacaatgtctgacgcaggtagaaaaggattcggtgaaaaagcttctgaagctttgaagccagactctcaaaagtcatacgctgaacaaggtaaggaatacatcactgacaaggccgacaaggtcgctggtaaggttcaaccagaagacaacaagggtgtcttccaaggtgtccacgactctgccgaaaaaggcaaggataacgctgaaggtcaaggtgaatctttggcagaccaagctagagattacatgggagccgccaagtccaagttgaacgatgccgtcgaatatgtttccggtcgtgtccacggtgaagaagacccaaccaagaagtaaatctttcggaactctttgtagttacatgggtttttttctttgtgatgtgtgtga

SEQ ID NO: 43 - DNA, 1623 bp, Zea mays
  CDS (125)..(1156)
gtcgacccacgcgtccggagatcggctgcctcgatttctcttcgagtgccaagcagtactgctagttctacttctgtacttcagcagtagtaggccgctgttgctacaattttgactgactgagatgggaatcctctgcctcggtgcttcctccacactgctctgcggggaggacaggaacaacgtactcggcctcggctgcggcaacgagctggtggaggtggggagcggccatgacggcttggactccgtcgtcggcgccgtgttccccgtggacacagatgaggccgtgcgggcgttgttggagaaggagacggaccacaagcctcaagacggctatgcggagaggctggagcgcggcggattggagtactcctggaggagagacgccatggattggatttgcaaggtccattcgtactacaggtttggaccactcagtctttaccttgctgtgaattacctggatagattcctctcctcatatgatctcccacacgataagccttggatgcgacagttgttgtcagttgcttgcctagctctcgctgtcaagatggaggagaccgtgctccctcttcctgtggaccttcaggtctgcgatgtgaaatttgagtttgaagcaaggactattgggaggatggagcttcttgtgctggccaccctgaaatggagaatgcaggctgtgacccccttcactttcatcagctacttcctcgacaagttcaatggtgggaagccgccgagtatggcactagcgtcacggtgcaccgagatcataattggcacactcaaaggctctacattcttgtcattcagaccatctgagattgccgcggcctcagctctagcagcagtttctgagaatcaggttgttggctcctcgagtgctctttcagcatctgaagtccctataaataaggagatgattgctagatgctatgagctgttgcaagagcaagcgctggtgaggaagacagggcacatcaatggaagcccttcagtgccgcaaagcccgattggcgtgctggatgcaacatgcttcagctttaggagtgaagatgtaagactaggatcatcgcaatcaaacaacatcagtagtagtagtaacgacaatcaagtttctaagaggagaaggctaagcatatcaccaatctgagtagatcaaaactctgttggcagtgtcgcattgtgcgcttggttatgcattgatcatcttaacctcagagcttgtcagagcaacaagtagtggtacaaaaggacccagtgaagcattgtaacaagcagaggatggtgacagtaataagttagaagcagcttcttgatctctgcgacgaaataggtgacgaggaacgtttcttcctctagtaactttgaatccccttcctccccggtccctttgttttattccttttcctttttatcggtatctcaaggcatttgtggggactggggagatatatgtggatatgagattggagacgtgaggattaaagagagagagagggagggagggagataaaaaaaaaacaggtttgttcctttgttctctgccaatatacaaaaaaactgtcgtgcgaaaaaaaaaaaaaaaaaaaaaaaaaaaaaaaaaagggcggccgc

SEQ ID NO: 44 - DNA, 1793 bp, Oryza sativa
  CDS (148)..(1407)
  unsure (1)..(1793): unsure at all n locations
aaataataatgtcttgccttttgtagatccgcgtggctcgtactgctacatgttcatatcgctgcctgtttcttcgatttctgacaaaaaaagcgttcgtgttctgacaaaatttcggtttggtttttctacagtagaacgtcagcaatggagaacatgagatctgagaactttaaccaaggtgtttcaatggagggcgtcaagcatgcgcccgagatggcaaacaccaacaggagggctctgcgggacatcaagaacatcatcggagcacctcaccagcacatggctgtgagcaagaggggtttgctagataaacctgccgctaagaaccaatctggacaccgtcctatgacgaggaaatttgctgcaacactggcaaaccaaccctccattgctcccctggcacccattggaagtgagaggcaaaaaaggacagcagattctgcatttcatggtccagcagatatggagtgcaccaagatcacatctgatgatttgccattgccaatgatgtctgagatggacgaagtgatgggttctgaactgaaagaaattgagatggaagacattgaggaggcagcacctgatattgacagctgtgatgcaaataactcccttgcagtagttgaatatgttgatgaaatttacagcttctacaggaggagtgagggtttgagctgtgtctctcctaattacatgttgagccaaaatgacataaatgagaagatgcgcggcattctcatcgattggctgatagaggtgcattacaagttagagctattggatgagaccctcttccttactgtgaatatcatagaccgattcttggctcgcgaaaatgtggtgcgaaagaagcttcagttggttggcgtgactgccatgctgctcgcctgcaagtatgaagaagtgagcgttcctgtagtggaggatcttatcctaatctgcgaccgcgcctacacaagaacagatattctcgaaatggagaggatgattgtaaacactcttcagtttgatatgtcagttccaactccatactgtttcatgagaaggttcctcaaggctgcacaatctgacaagaagcttgagctcatgtctttcttcataattgagctgagccttgtcgagtatgagatgctcaaattccagccgtcaatgctggcggctgctgccatctacactgctcagtgcaccattaatgggttcaagtcctggaacaaatgctgtgagctgcatacaaaatactctgaagaacagctgatggagtgctccaagatgatggttgagctccaccaaaaagcaggacatgggaagcttactggagttcatagaaagtacagcacatttaggtatggttgccccgcaaaatcggagcccgccgtcttcttgctcaagagcgtggcactgtaactgattggctcactatacacactctaactacttccatggaaagagggaatgaggggtgtatatatagaggccggctgctttgatgaaattacagagaagagatctgcatatatgcaacagctgttgcaaaggattatttgatgggtgggttgggttggtgcaatgtgtgcctttacttccaataacttaacatcgtcgagacattgatctgcgtttggatgttttaggttgcttccaattaaatctgttggaacttgatttcatgttgtatttaagagaattattcttcatttgttctgtggcacatgcaatttgccaataaacattaattgaattgcctgttnaaaaaaaaaaaaaaaaaaaaaaaaaaaacaaaaaaaaaaaaa

SEQ ID NO: 45 - DNA, 1223 bp, Oryza sativa
  CDS (97)..(870)
ttcccccctcccctccggcgaactccgagctcttcccggtgagcgccgccgattcggccggagaggctcgccggagtcgcctccgccctgcccacgatggccgccaacttctggacgtcgtcgcactgcaagcagctgctggaccaggaggacgtggacaaggtcccccaggcggacagcgaccggggcatcacgctggaggagttccgcctcgtcaagatccacatgtccttccatatctggcgattggcacaacaggtgaaagttagacaaagggtgatagctactgctgttacttatttcaggcgtgtatacacaagaaagagcatgactgaatatgatcctcgtctggtagcaccaacctgtttgtatttggcatcaaaggtggaagagagcacagtgcaagcaagacttcttgtcttttacataaaaaagatgtgtgcttctgatgagaagtaccggtttgaaatcaaggatatccttgaaatggaaatgaagctcctggaggcacttgactattatttagttgtttaccacccatatcgtcctcttttacagttattgcaggatgctggcataacagatctgacacaatttgcctggggaattgtcaatgatacttacaagatggatcttattctcatacacccaccatatatgatagcattagcctgcatctacattgcaagcgttcttaaagacaaggacataactctgtggtttgaagagctccgtgttgacatgaacattgtcaagaatatctcgatggaaattttggacttctatgacacctacaagattgatcctcaaagagggctcccagaggacaaaatagcccctgtgatgaacaaactgccttcaaaggcctaaagcagactgagccctagttcagttgttatcagtctgagcgtcaaatcaccttatgctcgtacaacaggaaatatgtgtcaccttccttggagaactttatatttcaaagccatatatatatatagtatcagaattcagaattgcccctaacgaacgatttaattcagaattccgaactatatacagctgttcctgttgcagcagcttgcgaggcaaatcatttacaatgaagatcccaacgggttgggaatggtctgtatctgtatgtgtttttgatgtgtaaaaaaaaacatggctttggtactatttagtttctatagcaaatgaaatcctgaaaaattcttgcggtgaaa

SEQ ID NO: 46 - DNA, 1611 bp, Oryza sativa
  CDS (74)..(1336)
cccacgcaggccatcgccatgggcgtctcggctctcctccgcctgtagatcgtgtggatcgtgcttacctgcgatggatagggcgagcgagaaccggaggctggcggcggtggggaagcccgtgccggggatcggagagatggggaaccggaggccgctcagggacatcaacaacctcgtcggggcgccgtcgcacccgtccgcgatcgccaagaagccgatgctagagaagagtgggaaggaagagcagaagcctgcattggtggtgagccaccggcctatgttgaggaatttcgcggcctccttgacgcgaaaagaacagcttgaccatcaggtttccgtggctgatgcagcggtcgtctgcactgatccacagaagaaccccatccccgatggcacagttgacgacgatgtggaatcgtgcgaatcgaacgactatattgccgtggatgaatgcaatgatactgatgaggatgagtccatgatggacattgacagtgccgactcagggaatccgcttgcagcaaccgagtacgtcgaagagttgtacaagttctatagagaaaatgaggaaatgagttgtgtgcagcctgattacatgtccagtcaaggagacataaatgaaaagatgagagcaattctgattgattggctcattgaggtccatcacaagtttgagctgatggatgagactctctttcttactgttaacatagtagacagattcttggaaaaacaagttgtgccaaggaagaagttgcagctagttggagtgacagctatgctccttgcttgcaaatatgaggaagtcgcagtccctgtcgtcgaggatctagtgctaatttctgaccgggcttatacaaaaggacaaattctggaaatggaaaagttgatcctaaacacactccagttcaacatgtctgtaccaacaccttacgtttttatgagacggtttctgaaggcagctcagtctgacaagcagctacagctactttcctttttcattctggagctctccctggtggaataccaaatgctcaagtaccgaccttcgcttctttctgctgctgcagtttacacagcacaatgtgctctcactcgttgccagcagtggacaaagacctgcgaactacatagtagatataccggagagcagcttcttgagtgttctaggatgatggtagatttccaccagaaggcgggagcaggcaagctcaccggcgtgcaccggaaatacagtacgttcaagtttgggtgtgcagccaaaacggagcctgctctcttcttgcttgagtcaggagcaggaggttacaaccttcagaagcagccttgttgaatgaatctattcccctggatagatttttttaacttagcttcagaacaactacagcaagcatgttgatgcttcacaaaagtgcagcagatttaccttactacagctcttttgtggtaatgtaaacttggtgtgaatgatggataatctgggtggtggtcagtccttcagttatactggggggctaataaatgattcaggcattcagcctatgtaagctgaatctcttgtaaatctacatgtgttcaagtagcatgaagaaaataacttgcatgttg

SEQ ID NO: 47 - DNA, 2004 bp, Oryza sativa
  CDS (97)..(1623)
gtcgggaagagcacccaaaccctcgcttccgccctcgcaaaccctagcgcccggaggaggaggaggtgggttgcggtggtagtttgccgtccgccgatgtcgagcaacctagcagcctcccgccgctcgtcgtcgtcgtcctcggtggcggcggcggcggcggcgaagcgacccgcggtgggggagggaggaggaggaggaggagggaaggcggcagcgggcgccgccgcggcaaagaagcgcgtggcgcttagcaacatcagcaacgtcgccgctggtggtggcgccccagggaaggccggcaatgcgaagttgaatttagctgcctcagctgcaccagtgaagaagggatctttggccagtggccgcaatgtgggcacgaatcgggcctcggcggtgaaatcggcttccgccaagccggctccggccatatcccgccatgagagcgccacacagaaggagtctgttcttcctcctaaagtgcctagcattgtgccgactgctgcactggcacctgtcactgtaccctgcagcagcttcgtctcccctatgcattcaggagattcagtttcggttgacgagacgatgtcgacgtgtgactcaatgaaaagcccagaatttgagtacattgataatggggattcctcctcagttctaggttccttgcagcgaagagcaaacgaaaacctgcgtatctcagaggatagagatgtcgaagaaactaagtggaagaaggatgctccttccccaatggaaatcgaccaaatttgtgatgttgacaataactacgaggatccgcagttgtgtgctactcttgcttctgatatctacatgcacttgcgcgaggctgagaccaggaaacgtccatcaactgattttatggaaacaatccaaaaggatgtaaacccaagcatgagagcgatcctgatagactggcttgtggaagtcgctgaagaatatcgtcttgttcctgatacattatacctgacagttaactacattgatcgttatctttctggcaatgagatcaatcgtcaaagactgcaattacttggagttgcttgtatgcttattgctgcaaaatacgaggagatatgtgcacctcaagtagaagaattctgctatataactgacaacacatacttcagagatgaggttttggaaatggaagcttctgtcctgaattacctgaagtttgaagtgactgcacctacagcaaaatgctttttgaggagatttgtccgtgttgcacaagtatcggatgaggatccagcattgcatcttgagttcctagccaattatgttgctgagctatcactgctggagtacaatctactttcttaccctccttcactagtagcggcatcggctattttcttggccaaattcatactgcagccaacaaagcacccttggaattccacccttgctcactacacacaatacaagtcgtcagagttaagcgactgtgtaaaggcattgcaccgcctttttagcgttggtcccgggagtaaccttcctgcaatcagggagaagtatacccaacataagtacaaatttgtggcgaagaagccctgcccaccctcaataccgaccgaattctttcgcgacgcaacatgctgaactagaaaaataaaccaaggattagttacagttgctgactgaattcttcctccagaggcacctatgccaggttgtgccgtagaccgttcagataaccttgatgcaaggcatgctgcttgccccccccccccccccccctggttctttcaggcggtttggctgagtgtagatagatcgatgcttctgctgtgtgtggtaacttttatggtactgatgtgctttcttctatcttcttttccctgtacctagatgatccatggttttcagtactttgtacatcggagtcctgcagcaaagctttaaacatcttgtttgatattagctgccaacctgggcgtctcctaggttgatgtatgatagagtctctgttcgtgttgcttt

SEQ ID NO: 48 - DNA, 5100 bp, Oryza sativa
  CDS (292)..(361),(1019)..(1347),(1447)..(1572),(1657)..(1908),(2059)..(2217),(2315)..(2493),(3276)..(3432)
gaccgttggaaagatagacgccacggcaaaattcctcaattccccaccaaaaaaaaccaacccatcgcctacaaagccatagccctccctcttcttctccttcgaaaccaatccatctcgagttctcgccgtcaagaatcggaggagcagaggagagggaggagaattcgagagagaggagaggaggaggaggaggaggaggaggcggagtgaggtgtaagggggtggtggtgacgcgtcgctgattcgtgcggtttgctctgtggacgccgatcccggccgtttcgggcgatggcgtcgaggaggcagtggggagccggtgccggcgccgtcgatgttcctgctcaggaacgcaagggaggtaaggcggccaccgatcatctcctgcgcgcgttctttgccgtgttctttgttctggaggggctctcatggcggcggcggcggcggcgcgatggggagggggttttcttgctgcgatacgtcgcgtgcctgctttgccttcgtaggtttctcccgtccccggagattaggatttttaggatcgatggtgtgttcttgcggggttcttttacggtttcttgtccgatcgacgcttgattgcgaaattgtatgggttctttgatacgggttcttgttctgattcggcgtaaagagagcaccttttgaaaatcatgttcatgtgtggattattttttggtcccaaaatatgatcggaacgcatgtgcccgtggtggaagcagatgtttgtcgcgttggttgatttattgaatcgataggaatttcgcatgggttcttttggcatagaaatgatcttttgctggcgctgtgatggtttctgcgttgttctttgggtttgcttcgataaatctggcatcttcccagaattgcgtttcacctattgaatcgcgtttcttgttctgaatcatgcgtgcgctttcacctatttccgtgcaaaatttctcccttagcgattctgtgctttctcttgttactgatctgaaatttcgactttgtgcagaggctgccaagattgcgaggaggccaaagaccacgacggttgttgctcagcaaccgccaagaatccgtcgagccctcgccgacgtcagtaatctcgtcaatggccgggctgctctgcctgtcgtaaatcgccagaaggcagcagcagcagcagctgacaagtgcaggaaaccaatcaagcagcgcaacgagaacaacaaggcggccaagccagaagtcatcgtgatcagttcagactccgagaaacataagaaaaatccagcccagagagcagcctcccggagggcgccaatccaaacgctcacctcgattctgaccaagtgcagcagggtatgtgttctttggtgttgtttgattctgtaatgttgggaaatttttgtctgaagaatccgttttgttcttcttttgctgaacttgttctgaacacaggcttctgacggtgtgatcagcccgaaaaaggagctgatatacgacatcgatgcatctgattctcacaacgagctggcagtggttgattacgtcgaagatatctacagattctacaggaacaccgaggtgagcttagcttcctcttcttttatgccaaatcaattggtgatggaacggtgattgattactcttgctgcttgatttgtccagaacacctaccggcctctctgcacctacatggtgtcacagaccgagatcaacgagagaatgagagcaatcctgactgattggctcatcgaagtgcactacaggcttatgctgatgccagagacactgtacctcactgtctacataattgatcagtacctgtccctggagaatgtgcccaggaaggagctgcagcttgtcggtgtaagcgccatgttgatagcctgcaagtatgaggagacttgggctccattggtaaggattccacttctgcacaccactgatgccgttcaattttgcatatgatatgctcaacttgctattgtgttcaatgctgttcaatttgcatatgactttcagcttgcacttgcttcttgtcttacagttgagctgccatttttgcaggttaaggacttccttgtcatatcagacaactccttcagcaggcagcaggtcctgagcacagagaagtccatacttaacaagctccagtggaacctgactgttccgacaatgtacatgttcatccttcgatacctgaaagctgcattgggtgacgaggaggtaactaacaagcacagtccattttcagttgttcttctgctggtgctatacatcttcaatgtgttgtaatgtgccattcttttttctgtcaatgcagctggagcacatgactttcttctacgcagagctcgcactggttcagtactccatgctcttttttgcgccatcggtgatagcagccgctgccgtctacgctgctcggtgtacccttggcctgagcccactatggagcgatcttctggagtaccacaccggcttagctgagccgcaattgctgtatgtcttcttcttcatgacttgatctttgcccatgaaatttgattacatattgaatctgaagaatatgacctgtgaattgaattgtgttgactgcgttcccagaaagggatttcagttatataaatttggaatgctaaataatccatcttttcacaatcgttgataacctgttgtccttaagtttcatattcagagatggtcttttttctcatttgctttagttacttaaatcttgcctatgaaattttgattacacgttgaatctgaagaatatgacttgtgaatgaattgtgttgactgcttgcctagaaaaggatttcagttatatataaatttggcatgcttagttacattgttgtgtctccaccagactgactgaattttgtactactgaaagtttcagttgaatattgtcctggactagttggtgatgtccaaactttctttgtatgcaatggcatgttatgctctctctagtctaatccaagaacttaatctgttcatgtggcttgatacagatagttgtaacctgaagaatgctgaacagatagtcctaacatatgctttgaacatagaacaaaatatgaatctactacatgcgtatgctgctaaaattgctagtgcctaaccaattactttgatctgcaccattcaattaaaacgcctgtatgcataaatatgctgatcaagattttgattacatgactcttatcaaagatctgcaccatccaaattattaaaacttaatctgttcatgtggcttgttttttgagctgcagggagtgtgcgaggcggctggtgagcctgcacgcggcggcgccggagagcaggcagaaggtggtgtacaagaagtacgcgagccccaagctcggagccgtctccctccactcgccggccaagaagcttctcccgccgccgtcgccggtggcggcttgagctctcgctgttggaattttggcctcgattggaagaacatgtgcatagataggatcggatcgtcgccgcgtcgtcgtatcatcgctttgatgttaccccccgtttctgatttgattcttccaaattttgggttcctgatttgattggattgctactgattcgaatttggtgcgaatgaaattatgaaaaatcatcttgatgtttattctttttccccctttcctttttgagaggtggtaataatatttacatctttatattacctgaaaaaaatgttgccacggatgggtgggacccacgtggacacgtggccaaacggcagccaagattttgatagcctctggccagattcgctttccagccacacgatttcttctgtgacgtgtggcgtgagataactcacgcagctcagctggggccgacttcgtgggtcccacgagtcccatcccgatgatatgtggggccactggtatccgcgggcccacttgtcagtgtcaatggtgggagcatttaagtagaagaaaccagcactcaatcttcgactcctcctgctctgtttgttcgagtaattaattaagctccgaccacgaagcttctggcgattgtcggcgtcaagaacagcttgacgagcaggcagcaagaggattcgttcttcttctgtggtggatcttgattgggctccctgttttagtgttctgttcttcgcaagaaaggggccattctcttttggtttctacatgcaggtttgtgttcttcagttcttggtttgttgttgttgttatgggcatatacagtaagttctttcatggttagctggatgagaaatgaaagaaaaaaaatattgagaggatcggtgatgtccttgacgggagttaattgtgtgcaattgagtgatctgcttcagcttactcctctgttcttcttctttaatatgatcggttgtttgttcttctcaagaaaggccattctttttggtttctgcatgcaggtttgtgttcttcagttcttggtttgttgttgttatggcatgtacagtaagttctttcatgcttagcaggatgagaaccgaaaggcacaaattattagtgaaaagccaccgtgtgcgattgagtgatctcttccagcttactcttctactaccaattactctgttttcatcgaattcttcttctttgatatgatcttccacggttctgatctctgtcatgttatgatcctgtctgctaactagaattcttttttttttttggcttttcttttctgaatattgctgaacttttctaactcaactagagataactacaccactaattttcgaaatgacaccatgctcttgcataattaatcctgttgcctgcctttcggtgcacaagtatttgcaaagtaatcctgaattaaaatattctgccctgtttttgttttctttcagatgagtagcatggcatgccattcccttccagagagtggaagcaacttgtcagctgctgatgaactctttcagaaccaaaggtcagagcagggaatttactggacactctgggactccaggctatctgatgatctgaacacaacgaccgtatattcagacaatcatggcagcaacggtggcggcacgcaatctttcgacacctctgaacattgcagtacagtgccttcagattcagatga

SEQ ID NO: 49 - DNA, 1506 bp, Zea mays
  CDS (107)..(1222)
gaattcccgggtcgacccacgcgtccggcgacctgctcctgcccccgccgccgccgtgcacgcacagccggagcaggagcagcgctgcccgcctttaccgttgcccatggagaactctgccgccgccgccgccgcccggccgcgcctcacccgcgcagccgccaagcgctcagccgtcgtcacggctgtggccgtcgccgccaagcgcaagcgcgtcgcgctcagccagctgcccacgctccccaacgccgtgctcggcgcgcacgacgacgacgacgacaagcccgtcaggaagcagcgcctcctccccgccgccaagcccaagcccaagcccaaggcagcgcccgcgcctgccgcgcccgccgccgcggatgacacggatgacgacattcagctctgcaagccctacgcttccgacatctactcctacctccgctccatggagtcgcaggccaagcgccgcctcgctgttgactacatcgcggcggtgcagatcgacgtcacgcccaacatgcgtggcatcctcatcgactggctcgtcgaggtcgccgaggagtacaagctcgtctccgacacgctctacctcaccgtctcctacatcgaccgcttcctctctgccaaagttctcaacaggcagaagctgcagctcctcggcgtctccgccatgctcatcgcatccaagtatgaggagatcagcccgcccaacgtggaggatttctgctacatcaccgataacacctacaccaagcaggaggtagttaagatggagagtgatatactgaatgtcctcaagtttgaggtgggcagtcctaccgccaagacgttcctgaggatgttcatcagatctgcccaagaagacaacaagaagtatcctagcctccagttggagttcctggggagctacctttctgagctgagcttgctggattatggcttgattcgctccttgccgtcacttgttgcagcctcagccgtctttgttgcaaggctgaccctggatccacacacccatccctggagcaagaagatgcaaacgctaacaggctataagccatctgagttgaaggactgtgttgctgccatacataatttgcagctcaaccggacatgtcaatccatggtggcgatccgggagaaatacaggcaacaccgattcaagggtgtatcagctttgctacctcctgttgagatccctgcatcatacttcaatacactgaaggagtaggtgttccttgataatctaagagagccaagcacacagctttcctcaagcaagatgtgcaatgctaaggttgttagggtactgaggttcttggatgctgcatctaggcttggcttggagcattcagagttgatttgtttgaagttcaaactcaatagaaagttcggtgtatcaaatcttgtacttgtgtatcataattatacattacaaccaggtgcctttatttattgggggcacaattccaaaaaaaaaaaaaaaaaaaaaaaaaaaaaaagggcggccgc

SEQ ID NO: 50 - DNA, 1699 bp, Zea mays
  CDS (137)..(1408)
gaattcccgggtcgacccacgcgtccggtcacggggctcctccgtccgtaaggcaccgccgcagcgtctcggctggatcaacaggccggccgatccgtcttcttcccctcctcctgcgggtcggcgtttggggatcatggcggcgcgggcggctgacgagaacaggagaccggcggcagggaagcccgcgccaggcgtccgagacatggcgagccggcgcgcgctcacggacatcaagaacctcgtcggggctgccccgtacccctacgccgtcgccaagaagcccatgctgcagaagagcaaaagggacgaaaagcagccagcgttggcaagcagccggcccatgacaaggaaattcgccgcctccttggcgagcaagggccaacctgaatgtcagccgatcgtagctgatccagaacccgaagtttgtcaacagaaggaatcagtaggcgatggcaccgttgatattgacgtggaactctacgagctggtcgacggtagtgatagtgacatcgacatgggtgcgacagagaacaaggacattatgaacgaagatgaattgctcatggatattgacagtgcagactcggggaacccgtttgctgcaacagaatatgttaaagagctttacaccttttacagagaaaatgaggctaagagttgtgtaaggccagattacatgtccagccaacaagacataaactcaaagatgagagcaattctgattgactggctgattgaggttcactacaagtttgaactgatggatgagacgctctttcttatggtaaacataatagatatattcttggaaaaggaagtggttccaaggaagaagctacaactggttggagtcacagctatgctgctcgcttgtaaatatgaggaggtatctgttccagttgttgaggaccttgtgctgatatcttaccgtgcctacacaaaagggcaaattttagaaatggaaaagttgattctgaacacgctgcagttcaacatgtctgttccaacaccttatgtcttcatgaagaggtttctgaaagctgcagatgcagataaacagcttgagctagcgtcatttttcatgctggagctctgcttggtagaataccaaatgctgaattatcggccttcgcatctggctgctgctgcggtttatactgcacagtgtgctatcaatcgttgccagcactggacaaaggtctgcgagtctcatagcagatacactagcgaccaactcctggagtgctcgaggatgatggtagattttcaccagaaggctggaaccagtaagctcactggcgtgcacaggaagtacagtacctacaagttcggttgcgtggccaagattttgcctgcgcagttcctgctggagtcgggagggacaccgcctccttcaggtgcaaactagttgaatcgacctattcaactgggtggattttttaaagtttttagaatactccatgaacaagatgcagaaaacatcgtgttgatgttgcccaaaagtgcatcgaatttctttggagagttatgattaacaactttttttttatctatgttgaatgacgagtgacggtcggtcacgttgtgcttgtgcagttatactgcggctaataacaaactgtccagttattctaaaaaacaacgaacgatgttcaggaaaaaaaaaaaaaaaaaaaaaaaaaaaaagggcggccgc

SEQ ID NO: 51 - DNA, 1751 bp, Zea mays
  CDS (82)..(1518)
gaattcccgggtcgacccacgcgtccggtccgacgagccctagggaacgcgagaccggccgtcggcgagagaaggactcgaatggagtgcgcaagggagttgcgggttcgctccacgtttacggcggcggccatggcgtccaagaagcaggtggggcctggaggcgcggttcccgctcaggaacagatgaacggcggcgatgccgccagactggtcaggaagccaatggatacatttccacagccagcggcggcaagaggccgtagggcacttgtcgacgttggcaatcttatgaatggccggccttctcttgtgaaccatcagaagcaagcggttgcggcagcggcaaccagtcataaaccactcaacgtcggcaacaagaagccacttgttcctcaggcagcagcaagaggcctgcgaccccttgccgacgttacgaatcttatgatcaaagaccgtgctgctcctgcaaatcgtcagaagcctgtggatgctgtgtttaacaggaacgggaaggcagtaaagctgaaggaatgcaaggtgaagcctgaagtcattgtgatcattccagattccgagaaggagaagaaaggcaaattccctggaggtcagagagtctgtaggagggtgccaacactttttgacaatttgacaaaatgcagcagggcctctgatgggattaccaccccgaagaagaaggatccatatgacattgatgcacctgattcttgcaatgagctggcagtcgttgaatatgttgaggacatttacagattctacaagagcactgagggcacctgccttcctctcagcagctacatgagctcacaggctgaaatcagtgagagaatgagagctatccttattgactggattatcgaggtacagtacaggcttactctaatgccagagacactttacttgaccgtctacatcatcgaccagtacttatctatggagagtgtaccaagaaaggagctacagctcgtcggcataagtgccatgctgatagcaagcaagtacgaagagatatgggctccactggttaaggacttgatgtgcctatgtgacaacgcatttaccagagaccagattctgaccaaggaaaaggccatcctggacatgctccattggaacctgacggttccaacaatgtacatgttcattgttaggtacctgaaagccgcaatgtgtgacgcagagcttgagaacatgacattcttctactccgagctggcattggtccagtacgcgatgctggtttaccctccatcggtgaccgcagccgctgccgtctatgctgccaggtctacacttgggatgaatccacagtggactgatattctggaacatcacactggcctagctgagccacagttactggactgcgctaggcggctgatcagcttccatgccctggctccggaaagcaagcaaaaggcggtgtacaggaagtactccaagcccaagctcggctccgtcgcgcttcaatcccctgacaagaagctgttgtcaggttgaggctcgctgctgctcattgtattgtatatcatcgcttcgatggtaccatttgtttgggtcgtgtgctcttatgcttttctactgaagcagagcatgtgttggttagtcagtttgcttaaacgactactgaagcagagccttgtatgtgtgttgggagaatgtgatatgtgatgtcaagctcaaaaaaaaaaaaaaaaaaaaaaaaaaaaaaaaaaaaaaagggcggccgc

SEQ ID NO: 52 - DNA, 1850 bp, Zea mays
  CDS (254)..(1579)
gaattcccgggtcgacccacgcgtccgcgtcccccctcaagaactgtacccatcacgcgccgccatcgattgaccttgaccgacccgaccacccatcacgcttcttgttgccgccgctgttgcttgccgatacgcggtggctgcgctcgccggcggggaagaggggtcgcgggctgcgcgcctccagtctttcttcgcctccgtgctctcgggcctcttcttcggccaggccgatcaggacgaggaccaagagatggcctcgcgcaaccacaacgccgccgctccgcagcttcaccatcacaaccgagccggtgttcccgctcttggaaaggccaaggccgtgcccgcccgagctgacgctctgaaccggcgaccccctctcggcgatataggcaacctcgtcagcgtccgcccagccacagggaacccgcaggagcaggtcaatcgccccatcactagaagcttcggcgctcaactcgtcaagaaagcgcaggcgaaggccgcaatcaagaatgccgcaatcctgcctgcgaggcatgcgccgaggcaggagaggaaggctcctgtcaagcagcaaccgccgccggaggatatcatagtactcagctccgattctgaacagagcagggcgcagtccgagagcagcgctagctccgtccgctccaggaggaaggccatcaacaccctttcttccgtgctctcggctcgctcaaaggctgcctgtggaatcgctggtaagcctagacaagtggtcgatgacatcgacaagctggacgtcaacaatgagctcgcggtggtggaatacattgaggacatctacacgttctacaagattgctcagcacgagagacggccatgtgactacatcgacgcccaactcgagatcaactctaagatgagggctatcctggctgattggataattgaagtacaccacaagtttgaactgatgcccgaaactctctacctgaccatgtacatcatcgatcagtacctctcgctgcaaccagtcctgcgtaaggagctgcagcttgtcggcgtttcatctatgctgatcgcctgcaagtacgaggagatttgggccccagaggtgaacgacttcatcctcatatcagacagtgcatacagtagagaacagattctttcgatggagaagggaattctgaataggctggagtggaacctgactgtccctacagtgtatatgttccttgtccgttttctgaaggccgcaacattgggcggcaaagttgagaaagagatggagaatatggtgttcttcttcgctgaattggcgctgatgcaatacgatttggtgacacgcctgccatcgctggtcgctgcttctgctgtctacgcagccagactcactctcaagagggctcccctttggaccgacaccctcaagcaccacacgggcttcagggagtcagaggcagagctcattgaatgcacgaagatgctggtgatcgcgcactcgactgcccctgagagcaagctgagggttgtatacaagaagtattccagcgagcagttcggaggggtcgcgctgcgtccacccgcagaggagatctgcaagtgaacgaaggctactttatccgtgtttgcctattgcttgctttaggggaagtggcgatggaaggcgagtctgacattcgctaggcttttttatgtttgcttgtttcagacagccgtttgtttgctaggctgttctcagagtcggttgttatctgacttgtgatggcaactataattctatctagtacaacatttttattcataaatgtgaatggtgttttacaaggtaaaaaaaaaaaaaaaaaaaaaaaaaaaaaaaaaagggcggccgc

SEQ ID NO: 53 - DNA, 1628 bp, Zea mays
  CDS (220)..(1380)
gaattcccgggtcgacccacgcgtccgcgtcactacccacgccactgcatagaccgagaaaaaggacgaattttttcctcgccgcaacctcacaccatggaagaggcgatgccgccgccgccgccgccgctctcatcttcctcctccgccgccgtggcctgagctctcccatcgctcgctctctccatcgggcctacctatcctagcagtgaataagtcatggcagctttcgccgcgttgttcgaccccctctactgcccggaggagcacctcgatctgtaccacgaaggacccgtcgaggttgtggacgagcagtggcaggaccagcgcggacagcagcaaccggcggctcttgacgacgagctgccggcgctgttcgaggcgctccgggacaaggagggggtggtgctggcgggtgatggggaggaggatgggtacggcggctcggcaggccgggaggccgcagtcggctgggcgtcacgcgccgcggcacggctgggcttctctgcgctcacttccgcgctgtccgccgcctacctggaccgctgcttcctccccgggggcgcgctccgtctcggcgaccagccctggatgtcgcgcctcgccgccgtcgcctgtgtcgcgctcgccgccaaggtcgaggaaacgcgcgtgccgctgctcctcgacctccagctctgcgccgccgccagctccgacgctgacgcagcggacgcggacgtgttcgaggccaagacggtgcgccggatggagctgctcgttctctccgcgctagggtggcggatgcaccctgtcacgcccttctcctacctccagcctgtcctcgccgacgctgcgatgcgcctacgcaactgcgaggccgtcctgctcgcggtcatggccgattggaggtggcctcggcaccggccctcggcgtgggccgccgccgcattgctcaccacagccggcggcggcgacgacgactcggagctgctcgcgctcatcaatgcccccgaggacgagaccgcggagtgcgccaagatcatctccgaggtgacaggcatgagcttccttgtctgcgacgtcggcggcatgatcgccgggaataagcgtaagcacgcggcggcgcggatgtactcgccgccgctgagcccgagcggcgtgatcggcgcgctgtcctgcttcagctgcgagagctcgttgtccgccacagcggactcgcgcaccctcgctactacggctgcgggggtcggcccgtgggcaccgtcagcgcccgtgtccgtgtcgtcttcccctgagcccccaggtcgggcccccaagcgcgctgcggcggcgggggtcccgcatccgcttccccccgacgaggagagccgcgacgcctggccgtccacctgcgccgcgtgacgcaccgtgccggaacggtgcctatggcgagatcccccgctcaggtagtcaggtggcggtggggatataaaggagcatcagaatctcgcgccggtgacgagaacgaaccattttgcccattgccgcgagagatggggggctagattgcaagaagaaaaggatgtaatgtctgcatgctcatgtatggcagcacattttgcaatgatggttctcgatcgtaaaaaaaaaaaaaaaagggcggccgc

SEQ ID NO: 54 - DNA, 2067 bp, Zea mays
  CDS (218)..(1180)
gaattcccgggtcgacccacgcgtccgctaccctccctcatcacttgttccactacgaccggccacctagctcgccgcgcgcgcaagcctgcgccaccacccactctactagcttagtctcccctcgtgcagcgcgacgacagccagcaatggccgccgcccagtgaggcagggtcgcagtgacggcacgagacgcacacccacgggcgctggcggcatgccgggcgacgcctacgacctcctgtgcgccgaggacgacgccgccggcagcgccctgctgtgcaccaccgacgacgacgacgggtgctgctccgctgtcgaggaggactcggcggcggcggcggcctccatcgccgagctcatcggcggcgaggcccagtactcgcccaggccggactaccccgacaggctccgctccaggtccatcgacccggccgcccgcgccgagtcggtcgcatggattctcaaggtgcaagaatactatgggtttcttccattgacagcctacctcgccgtcaactacatggaccggttcctctctctccaccgtttgccggaggacgggtgggcgatgcagctgctggccgtgacctgcctctccctcgctgccaagatggaggagaccctcgtgccctccctcctggacctgcaggttgagggcaccagcagatacgactgcttcgagcctgggacggtcggccggatggagctcctcgtcctgatggcgctcaactggcggctccgctcggttactcccttcaccttcgtcgacttcttcgcgtgcaaggtcgacccaggagggaggcacaccaggtgcctcattgcccgggccacgcaagtcattctggctgcgatgcatgacgtcgagttcttggaccactgcccgtcatcaatggcggcagcggccgtgctctgcgccatcggtgagacgccgtcactggagtcggtcagccctggggctgccgtcagctggtgcatcggccttgcagaggaagggatcagcagctgctacagactgatgcagcggctggtgataggcaacgtccggacaagggtcgccagcacgacgaccatggcagcagtgaacctgtgctgctcggatgaggcgctgtcctcgcattcctccgccacctcctcgccacccccggccaagaggaggaagaggtcgccgacggccacgtgaaaactgaagaacgcaagtagataggattatttatacgcttttggggggcagattaacagggtttgatcgatttctttgcagtttgtttgtcgttttttcttctttgtgattctttctcctttttcccccttttgccatttatttgttctgttcttttgggttggatctctactcctcggtggggggattctgcctgcctgctcgaccggcccagtcatcatggcggcctctggcctctgcaccgccagccagtatgtgaaggcgacgagactcgagagagagaaagaaagacagctactacgtataacagacacatctgtgtttctctgtgcaacactctgtggggcttcttcaaccccgacgcagagctgcagagagggaccattgattggtgagcgagggcagccatggcggcagatggagatggagagggaggggggaagaggcaatgagttgcggtggatggatgatgattggtagggttaaatgaggtggtcaaagggccgggcggtcagtgctcctgccaagatgcagccctgcctgcaaagtttctgttcatattcatgagggcaaaaattgtttgtttccgagtggtttgtttgtattttgttgatgccgctgaggcgagggcgtcagagagagagaaagaggggcatgctttgctttgctgtgatgggagtcacatggatatgccctactgtggtggtgctctggagggaaatatttgtccatctccagagctaacagtgtccaagcatggggcttttgggggcccttgctgattgtttgtatctcttttttcttgcttgtgtatcaatgaagattttgccatttgaattggcctgagaagagagtaaaaaaaaaaaaaaaaaaagggcggccgc

SEQ ID NO: 55 - DNA, 1823 bp, Zea mays
  CDS (288)..(1334)
ggtaccggtccggaattcccgggtcgacccacgcgtccgcatgaccccatttcatttctctacctctccagctgcccacttctctgtgagcgcgcgcgagtgtggagagaagggagggaattcccccctttctgttcggcgcacgcacccgcacgccccacgctgcacagtgcacgccgccttttcctccgccttgctgctgcgagtccgcaaccactggaggaaaaatcttttccttcacttttcttccctttccccccgcgcatgcacgggctctgattgacgccatgggggacgccgcggcctccacgtccgctcccaccacgcccacctccatcctcatctgcctggaagacggcagcgaccttctcgccgatgccgacgatggcgccggcactgacctcgttgtcgcccgcgacgaacgtctgcttgtcgtggaccaggacgaggagtatgtagcgctgctcctgtccaaggagagcgcgtcaggcggcggcggcccggtggaggaaatggaggactggatgaaggccgcgcgctccggatgcgtccgctggatcatcaagaccacggcgatgttccggttcggcgggaagaccgcttacgtcgcggtgaattacctcgatcgcttcctggcgcaacggcgagtcaatagggagcatgcgtggggtctgcagctgctcatggtggcgtgcatgtcgctggcgaccaagctggaggagcaccacgctccgcggctgtcggagttcccgctggacgcgtgcgagttcgcgttcgaccgcgcgtccgtgctgcggatggagctcctcgtcctgggcaccctcgagtggcggatggtcgccgtcacccccttcccctacatcagctgcttcgcggcgcggttccggcaggacgagcgccgggctgtcctcgtgcgcgccgtggagtgcgtcttcgcggcgatcagagcgatgagctcggtggagtaccagccgtcgaccatcgccgtagcatccatcctcgtcgctcgcggcagggagacgcccgccggcaatctggacgcgctcaaggcgatcctgggctcatcatttccgcagctagacaccgggcatgtgtactcctgctacagcgcaatgattcgggaggacgacaagtcgccgacgcagtcgacgtcgacgtcgacgggggtggcgtcctcgggcgtctctgtcgccgcgcacgccggggggagcgggagtcccagccccccgggcgcttccgtgtccgtgggcgccaataatgccgctggcaccgccccgccggcaaccacggacaaccgcaacaagaggagacggttgcgctcacctcagcgacagtaggagcagctcagctgctggcagtgcattgcagtgcagtgcagtccagctgcgttttcttttttcagctcaccatttccttttgctgccgattgtttcttcaggggtggccgtagagtgatttggtaatttagtgccggaaagattagtgcggtgtcgcagagtgatttggtaatttagtgccggaaagatttctttgttttgaggagatctttcgcgggaccaaagggaggggggcagtgtaaagacgacagaacaagcgtgaaggcctcgagagtcgagacctcacagggtaccgcctagcgcctactggggtgaaagtgaagtcaaggagtcgggagggtgtgtgtgaataccgtttgtagcagctagtgcgtccgtctgtcttttttttttctttctgtttattaattattaatagcctgctcaaaaaaaaaaaaaaaaaaaaaaaaaaaaaaaaaagggcggccgctctagaggatccaagct

SEQ ID NO: 56 - DNA, 1679 bp, Zea mays
  CDS (88)..(1425)
cttctccttgtcccgtgtcttttcaaggatagcccgggcgcacgcagcatttcttggcgtcggtgtccgcgggttggcgactaagcaatggcgacgaggaaccaccgcgccgctgccgctccgcagccggcgaacagaggtgccgcgagggtcgccgggaaacagaaagccgccgccgccgggacacgccgagccctcggtgacattggcaacgtcgtctccgatgccctcgacagggcgatcaagctgccggaggggatccatcgccccatcaccaggagcttcggcgcccagctcatgaaggccgctttggcgaacaagaacgccgacgccgccgtagctcctgctcagcctgtagcggcgcgcgccgttacgaaaccagctaggaaagtgactacgaagaacgtccctcgtcctggcgctgggcaggctcccaaggagaacaagaagccatcagcagagggtgccgccgccgcgagcggccgctctgtgcagaagaacaggaggaagaagcccgcgtgcacgctttcgaccgtcctttctgcgcgttctaaggctgcctgtccggttaccgagaagccaaaggagcccatcgaggacattgacaagttcgacggcgacaaccagcttgctttggtggactacgttgaagacatctacacattctacagaccgcccatgcatgagagccgccccattgactacatggggcaaaccagccctgagctcagccccagaatgcgctccatcctcgcggactggctcatcgagtctcaccgaagattccagctcatgccggaaacgctctacctcacaatatacatcgtggaccggtacctgtcgctgcagcccacgccgaggagggagctccagctcgtcggcgtggcagcgttgctgatcgcctgcaaatacgaggagatctgggcaccggaggtaaatgacttaatccatatagccgatggcgcgtttaaccggagccagattcttgccgccgagaaggctattctgaacagcatggagtggaaccttacggtccccaccccgtaccacttcctgctgcggttcgcgaaggctgccggtagtgctgatgaacagcttcagcatacgataaacttctttggagagctcgcgctgatggactacggtatggtgatgaccaatccttcgacggcggctgcttgcgctgtgtacgctgctcgcctcacgttggggaggagtcctctctggacagagaccttgaagcaccacactggtcctcaacgagcagcagatactggaagggccaagacactggtcggatctcatgctgctagtgctagccctgatgcgaggctgaaggccgtctaccagaagtacgccacggagcagtttgggcgtgtggctctgcacccaccggcaccggctgctcttcccgaccttgtctagagtttttacttgacaaggctgagggatttagttgagttcgctttgattgacaagttcgagagttgtttcgtatactctattctcgcggtgtattagacactagtagtaacaactattcataactatatgaataaccacaatcaaaatttatgattggctgaagcttctttcgaaagactgtgaggtatttccacagttttgtaagactgtcagaatgaaacggtcttgattaaaaagagctgtctgccaactgc

SEQ ID NO: 57 - DNA, 1864 bp, Zea mays
  CDS (250)..(1422)
ggtaccggtccggaattcccgggtcgacccacgcgtccgcccacgcgtccgcgtcactcgccacgccacgccaaagaccaagaaaaaaaaggacgattttttcctagctgcaacttccctcacgccatggaggaggagatgccgctgcagctgctctccgcttcctccgccgccgtcgctgtctgagctcccccttcgctcgatctctccatcgggccgggcctacctctcctagcagtgaatcaaaccatggcagctttcgccgcgctgttcgaccccctgtactgcccggaggagcacctcgatctgtaccgcgacgaacccggcgagggtgcggacgagcagtggccgggccagcacggacagcaggagccggctgtcctcgacgacgagctgccggcgctgttcgaggcacaccgggccaaggagggggtggtgctggcggaggatggcgggtacggcggcgcagctgggcgtgaggccgcggtcggctgggtttcacgcgccgcggcgcggctaggcttatccgcgctcaccgccgcgctcgccgccgcctacctcgaccgctgcttcctccccgggggcgcgctccggctcggcgaccagccctggatggcgcgcctagccgccgtcacctgcttcgcgctcgccgccaaggtcgaggagacgcgcgtgccgccgctcctcgacctccagctctacgccgccgctgacgccgcggatccgtacgtattcgaggccaagacggtgcgccggatggagctgctcgtgctctccgcgcttgggtggcggatgcaccctgtcacgcccttctcctacctccagcccgtcctcgccgacgctgcgacgcgcctgcgtagctgcgagggcgtcctgctcgcggtcatggccgactggaggtggcctcggcaccggccttcggcgtgggccgccgccgcgttgctgatcacagccgccgccggcgacggcggcgacggcgacggcgacacggagctcctggcgctcatcaatgcccccgaggacaagaccgccgagtgtgccaagatcatctccgaggtgacgggcatgagcttcctcgcctgcgatgtcggcgtgagcgccggaaataagcgtaagcacgcggcggcgcagttgtactcgccgccgccgagcccgagcggcgtgatcggcgcgctgtcctgcttcagctgcgagagctcgacgtccgccaccgctatggctgcggcggtcggcccgtgggcgccgtcggcgtccgtgtccgtgtcgtcctctccagagccaccaggtcgggcccccaagcgcgcagcggcggcgtcggcgtcggcgtcggcgtcagccggggtcgcgccaccggtccaggtcccgcatcagctaccccccgacgaggagagccgcgacgcctggccgtccacctgcgccgcgtgacgcaccgtgccggaaacggtgcctatggcgagaccgccgttcggtggcggtggagaatggagaacaaggagcatcattggctcgcgtcggtgagcaggagaacgaactattttgcccattgccgtgacagatggggggcaagagagataagaaaagatgtccttgtttgcatgcttatggcgggagtaatgtttgcatgcttgtggcagcacattttgcaatgatggttctcagagaacttagctggaggtggaagatgattagcggataatttgccgtcgagatcgatggcgatttagtatttgttgcaactgtagtgatgctagttcttgccgtgttcttgttggttcttggcattgcttgcttggaaggggcctccgacctccgttgtcctgaaaaaaaaaaaaaaaaagggcggccgctctagaggatccaagct

SEQ ID NO: 58 - DNA, 1647 bp, Zea mays
  CDS (229)..(1275)
gaattcccgggtcgacccacgcgtccgaatagaggtgtgatcggctcaagcaccagctagccacctcgctgcctcgctggtgctcttccacctcctgcaccacagcgccattgcgcttccacggccagctaccgctgccggaatatacactggtggatctttaacaggttcctccggtccgatccaccgccagcttccgacgtcgtactcgggcggatcggttccacaatgggggaacggggagcagaggaggacggctcgggcggctcctccctctccctcatgtgcctggaggacggcgccgacctcgacgccggtggctccgcggagagcgccgacgacggcgagccggccgtcgttgctcacagcgacgccggtgaggaccaggaggaggagtacatggactacctcgtgtccaaggagagcagcttctgctgctccccttcctcctcgcccgtctcctccgacgccggcgccgagacgcgcccttcgtccacggcgtcgtcatccgacgagtggttccgctgcgcgcgccacgccaccgtcgcgtgggtccttgagacgcgggcttacttcggcttctcccaccgcgcggcgtacctggccgtctcctacatggaccgcttctgcctccgccggtgcatggacgtgtcagtgatgccctgggcggcgcggctgctggcggtggcgtgcctgtccctggcggcgaagatggaggagtaccgcgcgccggcgctgtccgagttccgcgcccacgacgactacgacttcagcagcgtctgcatccggcgcgtggagctgctggtgctgtcaacgctggggtggcgcatgggcggtgtcacgccgctggattacctcccctgcctctccttcaggctacgccgaggcggtggcggcgggctcatcgccgccaaggccgccgcacttatcttctccgccgcggaagctgccagcgtgctcgactacaggccgtccaccgtggccgtcgccgccgtcctggcggcggcccacggcgccatgacaaaggaagcgctggagtgcaatatgagcagcctcactccgtcctgcctgctcgacaaggacgacgtgcacgcctgctacagcacgatgctgagcgagagctcctcgcctacgccgagcaagctggcggacaagagaccgccgccatccagctccggctcgacgatgtacgagtcggtcgacgcggcctcctcgttcgcggccacggcgggccggagcaagagggcgcggctggagatgccggccattggcccatgagaagcaccgccgggacacgatcgtttatttttttgccacttgtcctgtgctgtgcggctgtggcggcctgccggggctaatcttcttcgccaactgtagttttttttttcttcttccagctttgacttttcagttgtttgattgatcacgcggcgcgcgcgcgcagcacgctctgctggagaaacggtgacgcgcacgggcagtgccccggttgtggagatggagggtttggttgcctgtgctttgtttgcatactatagtttgatcctaatgatctaatccacgtacgatgaggtgaatgagaatgtaagttacacctcaatccacctaaaaaaaaaaaaaaaaaaaaaaaaaaaaaagggcggccgc

SEQ ID NO: 59 - DNA, 2003 bp, Zea mays
  CDS (107)..(1633)
gaattcggctcgagctcgccgctgccgcatcctcaccctcgtccgctcctccgctgccccaaaccctagcctgaggaggggtcctcctccgctaccgagacccacgatgtcgaccatcgctgcctcccgccgctcgtcctcctcgtcctcttccgcgaccgccaagcgccccgcgattgcggacggccccgggggacccaaggcgaccgccgcacaggccaagaagcgcgtggcgctcggcaacatcaccaacgttgccgcgcggggagggagggcttccgttggcggcagccttgggaacgtcatggcgcccaccagcagcgcgaagttgaatccaacggtacccttgaagaagccgtctttggcaacaagtgctcggagtgtgagttcttccatccggggttctgctgacaaaccggcttccatcaagccagctccaccagtagcacgccatggcagcgcaacacaaaggcataacaatgttcctcctcctaaagtgcctaccattgccgatgtgccaagtcgtgctcctgccttggtgtcctgcaccggcttggtgtctcctggacgctcaggagattctgtttcatccgatgagacgatgtcgacttgcgactccatgaaaagcccagactttgagtacgtagacaatcaggacacctcgatgctggcttcgttgcagcgacggacaagtgaacatctgcgaatatcagaggatagagatgttgaagaaaataagcggaagaaaaatgccgtggccccaatggaaattgaccgcatctgtgatgttgacagtgaatatgaggatccacagctgtgcgctactctggcttctgacatttacatgcacttgcgagaggctgagacgaagaaaagaccgtcaactgatttcatggaaacgattcaaaaagatgtcaacccaagcatgagagcaattttgatagactggctcgtggaagttgctgaagaatatcgtcttgttcctgatactttgtacctgacagtcaactacattgaccgttatctttctggcaacgaaatcagccgccaacggctgcaattacttggtgttgcatgcatgcttatagctgcaaaatacgaggagatatgtgcaccacaagtagaagaattctgctacataacagacaatacatatttcagagatgaggttctagatatggaagcttctgtactgaattacttgaagtttgaaatgacagcacctacagcaaagtgctttttgaggagatttgctcgtgctgcacaagcgtgtgatgaggatcctgctttgcatctggagttccttgccaattacatcgctgagctatcactactggagtacagtctactctcttaccctccatcactaatagctgcatcggctattttcttggcgagatttatactacagccaacaaagtatccttggaattccacactcgctcattacacacagtacaaaccgtccaaactgagcgaatgtgtaaaggcattgcatcgcctttgcagcgttggttctggtagcaaccttccagcaatcagagaaaagtacagtcaacataagtacaaatttgttgcaaagaagcagtgtccaccgcagatccctactgaattctttcgggacacgacatgctagactagaaacccagaagtgattccagttgcttactggattcttcttgatgtgtcttgaatgcccagtgtagcacagcacaactatgcaagtgctgataacccccaggttgtttcaggtgattacaggggtgtaatcaatgtttgtggtcatgttaggtcattggtgtggtttttcttttcctgcttccagtctttctgtatgtagatcagtgttttcaggcgcttgtaaatccgagttctgtagtagagcacaatatcttgtaagttaactgaagaaatttggtgatcaaccaagttacctacaacttatgttgagctggtgatcaggtttttgcgctagttgaaaaaaaaaaaaaaagggcggccgc

SEQ ID NO: 60 - DNA, 1920 bp, Zea mays
  CDS (206)..(1252)
gaattcccgggtcgacccacgcgtccgacgtcggcctcttccacggccgccgccgtcgtcgccgccgccgccacctcgccgccgaccaccataccatcagatatttcagagctcgcgcccctcacgcatggttcttggcttcttgcttcttgctcgacgtgcgccgtaactaatcgactataagcgtggtgacacgtctgacgagatgatgccggtggcggcggtggatgactggtcggagcgcggtttctcgctgacctgcgaggaagactgcgccgacctcggcaacggcgtcgtagacgacgacgagttcctcccgctctacaatgccggcgaagaggaggaagaggagtatttggagcagctggtgtttaaggagaccagcctctgctcctcctccgactcagccgcggactgcgacggcgacggcgaaggagacgaagaatacccctcgctcgcctctgaggagtggtttcggcaagctcgcctcgccgccgtcaagtggattcttgaaacccgcgggtgcttcggcttcggccaccggacggcgtacctcgccatcgcctacttcgatagcttcctcctccggcgacgcgtcgatagggaggcgatgccgtgggcggcgcagctgctgtccgtggcgtgcgtgtccgtggccgccaagatggaggagtgccaggtgccggcgctgtcggagttccacgccggcggctacgatttcgactcggcgtccatccggcggatggagctgctggtgctgtccacgctcggatggcgcatgggcgccgtcacgcccttggacttcctcccctgcttctcctcccgggtccacccgcacggcggcgccggcgccggcggccacgtcgcccacaaggccatcggtttcatctttgccacggctgaagctggtagcgtgcttgatcacaggccgtccactgtggctgcagctgcaatcttggctgcaacctatggacctctactgaccaaagaagcactcgattccaagatgagctacctttctccatcttgtcttattgagaaggaacatgtacatgcctgctacagtatgatggttggggacaataacaggagaggtagcaagagatcattgccatgttcagtctccaacgagattgccactagtacatatcattctgttcttgttgatgatgttacggacaccgccgccgcctttgccacggcggtatcggccaggaataagcggatcaggctggagctgacgggcatcagttgagaaagctagcaccaccggggacacagtttttagccagatgtctaggggggcttggtttgatcttccctttcattttcttcccttctttttgaacttatatgtttgcgaaaaagaagatatttttttaggttctttgagccattgccatgggttggcattggctgttgtcagatttgattggtttggtttgtgagaggtggaagagatgaacaaagcagagggctgagctttcctatggagaggagagcttaggttaataagcccaatgccagcgcccaaacagggcacacttcacattcagtgaactttacttcaaaggttgatgcaatgttgcattgcatgtggtgagagatgctgctgcagagaagatgcaaaacaagtggtaacaacactgagaggttgagggttttgccattgtttatagaacgagtgagcgagagagggagatgtttccctttttcacctgtgcaagtggatgtgagagtggtgtttcactctgcacttgcgagggttacatcgatttgtaacaaaccctgtgtacttgtgtaaccccctcttgttcctgaggaatggaatcagattgcgttttgcgtcaaaaaaaaaaaaaaaaaaaaaaaaaaaaaaaaaaaaaaaaaaaaaaaaaaaaaaaaaaaaagggcggccgc

SEQ ID NO: 61 - DNA, 1750 bp, Zea mays
  CDS (114)..(1385)
gaattcccgggtcgacccacgcgtccgtagctcctggctcgcggctcagcttgccactaccagcaagcgctcgtcacccgtcggttctccccgagtagctcgtcgcgtcggcaatggagaatctgagatctcaaaactgccaccaaggtgttgccatggagggagtcaagtttgcgccggagaaggccaacaccaaccggagagccctcagcgacatcaagaacataataggaggcccacaccagcacttggcggtcagcaagagggctctgtcagaaaaaccagctgctgctgctgctgcaaatgctaaagatcaagctggctttgttggacaccgtccagtcaccaggaaattcgctgcaacattggcaacccaacctacagttgcccttctggacccaattggaagtgaaagactgaaaagaaacgctgatacggcatttcacacacctgcagatatggaaagcacaaaaatgacagatgacagtcccttgcctatggtgtcggagatggatgaaatgatgagtcctgaactgaaagagatcgagatggaagatattgaggaggcagcacctgatattgacagtggtgatgcaggaaattctctggctgtggctgactatgtagatgaaatttacagattttacaggaaaactgagggtgcaagctgcgtccctacaaattatatgtcaagccaaactgatataaatgagaagatgcgtggcattctaattgactggctcatagaggtacactacaaactagagctgttggaggagacccttttcctaaccgtgaacatcatagacagattcttggcacgtgaaaatgtggtgcggaagaagcttcagttagctggtgtaactgctatgttgctcgcgtgcaagtatgaagaagtgagcgtacctgtggtcgaggatctgatcttgatcggtgatcgtgcatacacaagggctgacattcttgagatggagaggaggatagtgaacacacttaatttcaatatgtcggtgccgactccatactgtttcatgagaaggtttctaaaggcagcacaatcagagaagaagctcgaactcctgtctttcttcatgatcgagttgagtcttgtcgaatatgagatgctccagttctgcccgtctatgctagcagccgctgccatctacaccgctcaatgcaccataaatgggttcaagtcctggaacaaatgctgtgaactgcacacaagatattcagaagaacatctaatggtttgctctaggatgatggttgaactgcaccaaagagcagctcatgggaaacttacaggggtccatagaaagtacaacacttctagatatagctatgctgcgaaatcggaacccgcaactttcttgctggatgcctgaacctaagcttgaactatacacactcttaactacttccatggaaagagtggaagggaggctgcttcgactaaactacagaagtgggatctatctgaatatatgcaacggctgttgcagcaaatatttggtggggctgggttggtgtgttgtttgttagttcaataacttaacattaatgaaacagtgtttgtgttgtttaggttttttttccaattatatcgattggaatttcatttgttgtatcctggccatcattctttactcatgtcatgtgacacctctgcgttttgaaaaataaacattgattatgtggatctgctgaaaaaaaaaaaaaaaaaaaaaaaaaaaaaaagggcggccgc

SEQ ID NO: 62 - DNA, 1807 bp, Oryza sativa
  CDS (13)..(324),(623)..(709),(813)..(911),(1003)..(1204),(1314)..(1438),(1529)..(1774)
gggttgattgatatgggtgttctttgcttcggcgcttccaacatcctcctctgcgcggaggacagcagcagcgtgcttggcctgggcggctttggcggcggcggcggcgaggtggcggcggagctggggtgcggcggcggtggcggctttgatttctttggcttcggtggtggtgctgtgttccccatcgactccgatgagttcgtggcgttgttggtggagaaggagatggatcatcagcctcagcgggggtatctggagaagctggagctcggtggattggagtgttcttggaggaaagatgccattgattggatttgcaaggtgaatatgaatcaaaagtgtaggaaaaataaataaagctctaggatttttttttgctttatttgttactattgatggattaattgggtcttctaggtaggttgttgcatgcttgcgttacatctttgactctagcgtcgatcttgctttggctctgtgcatttgcctttgctgctaaacttgacaaagcaccagattgcagataacaatggggctttgccttttatatggacaaatttgtttttaagtagaaactgacgaaggtgctaatcttgtcttctctcatgtgcgcttgcaggtccattcctactacaactttggaccactcagcctttacctcgcagtgaactacctggataggttcctctcctcgtttaatctccctgtaagaatctgggacgtgtatgtacattgccactacttaattactgtatagtgaatcccggtagtgatcattgcgatgcttttgtttgttcttgttgttgtagcatgacgaatcttggatgcaacagttgctgtcagttagttgtctatctcttgctacgaagatggaggagaccgtggtccctcttcccatggaccttcaggtgaatgaatgaagagttacagttgaaatcgataattgttcagtgatcgcgcgatgatcttgtgctaaaatgggcttttgttgcatgataggtttttgatgcggaatatgtgtttgaagcaaggcatattaagaggatggagcttattgtgatgaaaaccctgaaatggaggctgcaagctgtgaccccattctctttcatcggctacttcctggacaagttcaatgaagggaagccgccgagctacacgctggcatcatggtgctctgatctcacagtgggcactctgaaaggtttgatcatattgcccgatgatttaatcgagaagatctacctgcattgccaatggcaacatctgatgaagttgtacttactagaaatttatgtgcaatgtttttacagactctaggttcttgtcattcagaccttctgagattgcggccgcagtggtgttagctgtgcttgctgagaatcagtttcttgtcttcaacagtgcccttggagaatctgaaatccctgtaaataaggtgagccttttcttgcattttaggaatggcatactgatctgccattgtattttcaatgtttctgaatgtgtcatgtttgtgcatccgcaggagatggttatgagatgctatgagctgatggtagagaaggcattggtgaagaagataaggaacagcaatgcaagctcttcagttccacacagcccgatcaccgtgttggacgcggcgtgcttcagttttaggagtgatgacacaacactaggatcatcacagtcaaacagcaacaacaaagattacaacagccaggactctgctcctgcttccaagaggaggagattaaacacaacaccaatctgataactgtacatacataacttggcattgctttgc

SEQ ID NO: 63 - DNA, 5000 bp, Oryza sativa
  CDS (312)..(500),(1123)..(1154),(1384)..(1553),(2048)..(2163),(2724)..(2825),(2946)..(3002),(3331)..(3474),(3930)..(4000),(4118)..(4223)
cattttggtgttaaggaaaagttctcaactggagctaccaaaggcagacttataccgagttcatccatggatgggcccatacacacagaaggcccaaaaagcaatacgtctgtacgctggctcggcccattagactaaccaccagacagaccaagtaaaccacagccttcgctacgaaggcaggcaaatccggtccaaaacccaaacccaacccaacgaccaaaccaccgaccggccgttccactgcgccattccttccttccccccacctcctcgtcgacgcggagatcgctcgctcgccggcgacggcgatggcggcatcggcggcggctgcggcggcggtgagccaggcgctgagggaccgcgacgtcctcgacgccgtcggcacctccgccgccgcgctttcgctcgcgggctcttccttcatcgtgctctgctacctcctcttccgcgagctccgcaagttctccttcaagctcgtctacttcctcgcggtctcggtgagcggctcagatctggaactacttggttttggggggttctgggttcgggaggctagcctcgtgatctgcgtaactgcgttgggttgcgatttggaattggggagcgcaaagtggggatctgagggcagtgcggtgttcatttcgcctccgattgagaaatattgggggttcacgccgtcagtttaaccaacggatgctctgtttttgctgcttatgcgtgcgagctgaagcagttctcgacaattttttttttgtaagatgtttgctatctgatcggcacttgaagtagcatagggcatgctccattttttttttagtgaaccgtgtgaggatgtttatgtcatagacccttacttcaatgtggcaagtgatgtccctataagtatccatgtaggcaattgctgggagatcacatttcgtgctactgtcttcttggattggaagtacagttggtttgttatctaattatcatgttggtttgttaatattattaattgctgcaagacaagctgatgtctctaatctcaatttcttcaagacatttggaaatttgtttgagagaaatgatatcacatttctattcaaggtgtttttctgacagcttctgtctaaattgcaggatatgttttgcagcttattcactattatggggtatgcttctgactgtgttattcaaattgtatttgataatgcacgtagttacttcctgacttaaataactgcaactaatgtaggagaaagtgtattactgtgaaggaaaaaacatattgttctttattttgttatttttggaactgttactcatgattacccctttttttgctgactttctattatgcgctagtgaaatattcttacacacatgcttttcatattgcaggggcccatcaaatgcattctactgttttgctcatgactacagtgcacacttcttctgtgtggcttcttttctatggacaaccactatagcgttcactcttcatcgcaccgttgtcaaacataaaacggatgttgaggagtttggatcaattttccacctgtatgtgtggggtatgcaattcttttgaccacttctctgcctttcttggagcttgtgcgtgccaaattagctggtgcaatattattaagaagttagaaatgcttgttgatttggtatagtgcttctttttcatttgaagtattgacaattttatagctgtttcatctatttgaagtgtatgtgattgataagagggaacaagcgggagcattttgatttcttatatctaagcattatgtagatttgatgcacatacttttgtttctccttttctgttattgttgtctgcattgtttgtcatctaagaaccaagtatgcaagttccagtttctcatgcatttttcattcctgtctgctaatgtatatactgaatggtagacaacttaagacatttgttgacttgacataattgcgaacatgtgttgtaactcatcctattaatcttgttgccctgcttgaatttacagttcttgtgacaataattttccttttatatgtttctcaggaacttcactagctacaactgtattacgttcaattggaagtgattatggaaggccaggcacctggtgttggatccaacaaggaagcatgggaaaggcatgtgaccttttgtgttttgtcatgaatcagttaacttggttctaacactgctaacacctatctacagcttacatttgaaccttatccatggtagtcagagtggcccaaattggtgctaatgacgttcctatatgtttttgctttcatttagtatttgagctgttatcaaatgatccaaaacaaactccactcaacagaataagtactacctttgtctcaaaaagacttcatttctagctatgaacctaggcaagtattgtctatattcatagtcagaaatgaagtctttgtgggatggaggtagtaacatttatttatttggaattgcttacgtaccttgcacaagacagatggtatcataaagtttagtgagtctctgagagtatacgcatgctttctcttagtttgtatgtttgactttttgtgcattggcttctttcttttccatatctttactgcaatctatgtcttctgttaatttgccatcttgatcctagctagaccactcattcaaaataaaaatattgtcactttgtcagaattttagcaattgttcattatatgtcttttatatgcaggtcttgcacttggtaaccttttatcttccattgtggggtgccattctctacaatgggtatacatactttcaggttaatcgcatgataaacaacgcgacaagggtatgcatacagttttctattttatattgatgataaataaggcttgtattgaatccttgtaaattctgctctttttgcttatatgttctgattttcataagataatggatgaatttgtagatggctgttggcataagtgatcgatcaattcaatctgacgtgagggcagacaagaaggtataaatttcctacacatctcttctcattatgtgtactgaaatattttcccctaatgtgctactgtattcttcctactatcatgaattcagagagtaactcatttgatcctattattttttttatacctccagtcttgagatgaactggagtataataccttatgttatcatgtttggagcaaaaatgatgtgtaaattctaggagtacttatattatcatgttacctggatgtctggatcagcctcgcaccactgtctactgtctggtagcagataggaatgtttatttgagcagatacagcttattgacttgttttcttttgcaggcgtttaatcggtggggttattaccctctcattctaataggttcatgggctttcgcaacaatcaatcgtgtgcatgactttgctaatccaggccacaagatattttggctctctattcttgatgttgggtttgccggacttatggtgagtattttcatcctagatgctagttacccagttctgaagagttttcataacatattgaaactactttgataatgtgggttgagccaaccttttaagtttagggctagagaaagaggcttagaggactccacgtatcttgttgtcagtcctgttgataattttttataaatgggagcgctggagttccaaccctactctttcttgaaacaggcctatgaaattggttgtatttcatacttagccttcagtatccaaagaattggctctatataatgcatagatgagtcatggtctcgtggagtcctcttgaagttctgtttgtagaagtgtattgttgttttgtttccttgtgaggcttacctcagcttgagcttatctcacaaaacttctctggcgttacatcatctgtgaacacattttccatggattctaatgcttcatggtatctttaggggctttttaattccatcgcttatgggctcaactcgtcagtgcgcagagcgattgctgaaagacttgacatgtgagttattttctagactttacaatcatctgttcctcctgtatcacctcatttccgtttatcatttactatattggtttatgcactatataacattttgtttcctgaattgtccaggtatctacctgagagatttaaaaggagcctccctactctgacacgatttaaaagtcagcaagaaaatgaacttacttctcttattgtcgatgcgagtaacacataggaatttttctagcacactaagtttgttcatatcttgtgggttcttcaatccagaaagggtgtatgacattactgtagagccagatgtttagcattaaccatttgttagcatgtggaatagttcccctgcggtcctttgttgattgccttgaacacgagcagtgtaatatattgaagttgcattgtccggagtacataagagattaggagatagccagagttgtagatactactatgacgttgatctgtatccctttttttgtggatgtatcagtgtaccaccctctccatgttttgctttcatatgtttgtctcaaaatactggccacaggccacatacggtacgacttactaatgtttcggttctcctgagtcctaacagttgacagtgtcaaaacagtttttcccattgatgattattttcaccttagtgaaagcgtagttcttgtaaactgcctcgtggccttgtccatgggaaaggaaaagcactaggctattgctttgagatggtgttggctcgagctctcgtccatagtggaaaaggagaagcggcaaaaggtgaatacatggggaaaggaaggaggctggcaattgctttgagatggtgttggggataggattcaacatgtttgaaggaagaattgaatagggcttgccttgcttaggagttacggtgttggggataggattcaacatattcgaaggaagaattgaatagggcttggcttgttcaggagttactcgaatatttctcggtcttgcacactctcgtcaacag

SEQ ID NO: 64 - DNA, 1627 bp, Zea mays
  CDS (181)..(1257)
ccgaggcatccttctcctttccctctccttccccaaacccttttcctctttccctcgccccaagaacttcatctcatctccaggcgccccttttgcgcttgcgcaggaggagctcacggggacagtgggcggagagctcgatcgctgcaccactacttcactggaggtccgcccactcccatggaggagatcacccaacactttggagttggcgcaagcagccacggccatggccacggccagcaccaccatcatcaccaccaccaccacccgtgggcatcctccctcagcgccgtcgtagcgccgctgccgccgcaaccgccaagcgcaggcctgccgctgaccctgaacacggtggcggccactgggaacagcggcggtagcggcaacccggtgctgcagcttgccaacggtggcggcctcctcgacgcatgcgtcaaggcgaaggagccctcgtcgtcgtctccctacgcaggcgacgtcgaggccatcaaggccaagatcatctcgcacccacactactactcgctcctcactgcctacctcgagtgcaacaaggtgggggcaccaccggaggtgtcggcgaggctgacggagatagcgcaggaggtggaggcgcggcagcgcacggcgctcggcggcctggccgctgcgacggagccggagctggaccagttcatggaggcgtaccacgagatgctggtgaagttcagggaggagctgacgaggccgctgcaggaggcgatggagttcatgcgaagggtggagtcgcagctgaactcgctttccatctccggaaggtcgctgcgcaacatcctttcatctggctcttctgaggaggatcaagaaggtagcggaggagagaccgagctccctgaagttgatgcacatggtgtggaccaagagctgaagcaccatctcctgaagaaatacagtggctatctaagctcgctcaagcaagaactgtcaaagaagaagaagaaagggaagctccccaaggaggctcgccagcagctccttagctggtgggatcagcactacaaatggccttacccctcagagactcagaaggtggcactggctgagtctaccgggcttgacctgaagcagatcaacaactggttcatcaaccagcggaagcggcactggaagccatccgaggagatgcaccacctgatgatggatgggtaccacaccaccaatgccttctacatggacggccacttcatcaacgacggcgggctgtaccggctcggctagccaccggtatctcgcttccatttcacaccccacggcctagctataaagactaatggttccaggtgtctgaagtactgaagacaggggggctagctatctaatgtttgtgccgcacgcatgagctgtaaggaggccatgcttaattattctgttgccgttgctactctatctatatgcgcctatgcctccgtgcatgaactatgctttaggtggttgctgctccacactgtggtggtgtgcttttgcttttgtgtggtcgtattgtatgcgtaacctgacagatggatccctgattgctacatgtttgaataatttgcatgatctagctagtttctgcctaatctaatggtacggctcatgtcttgtc

SEQ ID NO: 65 - DNA, 1164 bp, Zea mays
  CDS (277)..(1002)
ctctctgctccgggttcagagcagagctcagcgccctgtctccctccctccctccattcctcctcctccgctctctctctgcaggcctgcactgtgaggagactgtgacccggggacggagagctcctttcttctctctcatcgctccaccccttatttaccggtcggttgttcctgggccgtcccgtcccgtcccgtcgtctcgcctgggttctcgcttgcttctcaccatcactaccaccgtccacaccatcgcgagggcctggagggaagaggatgggacagggaggagaagtgaaggcggcgccggccgtgagggtgctggtggtggacgactcccccgtcgaccgcaaggtcgtggagctgctgctccggaaccacaaccaccagggcggcgccgcgccattccacgttaccgccgtcgacagcggcaagaaggcaatggagcatctccggctgatggagcaaggcggccagctggattcatgtgccgctgatgctaatcggataaccattgacatcgtgctcacggactactgcatgccggagatgactggctacgacctgctcaaggccatcaaggcgctgagctcccctaacccgatcccggtggtggtgatgtcgtcggagaacgagccccagaggatcagcagatgcctaaccgccggtgccgaggatttcatcctcaagccactcaagaccaaggacgtgcagcgcctgcgcaactgctccagcgccgctagacccagggacgacgcggcccaccagtgcgagagcttgaggaggagcagcagaaagctgcggtcggatcaggtcgccgcgcctggccacagatcgcaaccgacgacgggattaaccatggtgctgcatgcctccagcattgagctctcgcactacttccagttcctcctcaagttcgtgctgctcgcgtacgcggtgctgtgcctgaccgagctcctccacagatggtccaatggctccgtcctctccctgtggtctgcatgaggtcgactggaaccgcgatgcggtattattagtgtaaccactaaggctccaggctttcagttcaattcccccctgtaatccagtcctggcatgaggagccaccagttcttgctcgccgctccctatatttccatttcacttaaaaaaaaaaaaaaaaaa

SEQ ID NO: 66 - DNA, 2594 bp, Zea mays
  CDS (188)..(2245)
cccacgcgtccgccctgcttcgctgttccctttccccgcccctacctggggcatctgcctctgaatcgcggcggctcccgaggcgccgcctggcgagcgtctaggcgccggtctacggcgacgatggaggtgtgatttggacgggagagagcgtggtggtgaggtctcggttttctcgatataggagatggcggcggcagaggcgcggggaggggagttccccgtgggcatgaaggtgctggttgtggacgacgacccgacgtgcctcgttgtgctcaagaggatgctccttgagtgccgatatgacgtgacaacatgtcctcaggctacaagagcactaactatgttgcgagagaataggcgtggttttgatgttataataagtgatgtccacatgccggatatggacggattcaggctacttgaacttgtaggccttgagatggaccttccagttatcatgatgtctgctgattcaagaacggatattgtaatgaacggaattaagcatggagcatgtgactatttaataaaacctgtcagaatggaggagctgaaaaacatctggcaacatgttattaggaaaaaatttaatgaaaacaaggaccatgagcattctggtagcctagatgacaccgatcgtaacagaccaaccaataatgataatgaatacgcttcctccgcgaatgatggaggtgatggcagctggaaatctcagagaaagaaaagagagaaagaagatgatgaaactgacctcgaaaatggtgatccttcttctacatcaaagaaaccaagagttgtttggtcagttgagcttcatcaacaatttgtgaatgcagtcaatcacctcgggatagacaaagctgtcccaaagaaaattttggaattgatgaatgtcccaggcttaaccagggaaaatgttgccagccatttgcagaaattcagactctacctgaagagaattgctcagcatcatgcaggaatacctcatccatttgttgcgcctgtatctagtgctaacgttgctccgttaggaggactggaattccaagctttggctgcttctggtcagatccctcctcaagctctggctgctttgcaggatgaactccttggtcgacctacaagcagtttggcgttgcctggaagggaccagtcatctttgcgagtggctgcaatcaaaggaaacaagcaccatgaagaaagagaaatagcatttggtcaacccatatacaagtgtcagaataatgcatatggtgcattccctcaaaacagcccagcagttggaggattgcaaccttttgcagcttggcccaataacaaagttggtatgactgattcaacaagcacattgggaaatgtgggcaattctcaaaatagcaatatgctattgcatgaattgcagcaacagccagacaccttgctgttaggaacccttcacaatattgatgccaaaccttctggtgtagttatgccatctcagtcgttaaatacattcccggctagtgagggtatctcacctaatcaaaatcccttgattataccatctcaacccccaagttttgtgtcatcaattcctccatccatgaaacatgaatctcttcttggattaccttcaacgtcaaccagtctgttgggcgggcttgatatggttaatcaagcttcaacaagtcaggctttgattagtagccatggaacaaatcttcctggtctcatgaaccgtagctcaaatgcaatcccttcaccaggaattagtaattttcaaagtggaaatattcattatgttgttaatcagaacgctatgggagttagctctaagccaccaggtgttctaaagaccgagagcactgactcactgagttgtagttatggctatattggtggtagcaccagtgtggactctggcttgttctcttctcagtccaaaaatccacagtatggtctactgcagaatcaaaatgatgttaacggcagctggtcgccttcacaagattttgatagttttggaaattctcttgggcaaggccaccctggtaccacttcatctaacttccagagttccgcccttgggaagttgcctgaccaaggacgagggagaaatcatgggtttgtcgggaaaggcacttgcattccaagccgctttgcagtggatgaggttgaatctccaactaacaacttgagccacagcattggaaacagtggagacatagtgaaccacgacatatttggatttagtggacatatgtgaaactttcttgaatttcgttgatcagtgagcactggaaacaaatctagtggtttgatgaatggttgctagtaatttcgtttcttttttttttcttctgtaattggtttataaagggaataatctatgtggcagcatgtggaatcttactttatagaagtttgttcagttcaaaggacttaaaattggtcagtcccttgtcatatagcttcttttctttgttctctttttctgtaattaccaattgtagcattatttttatgaccgtcgtaattcagcctagtcgatttattcccggccaaaaaaaaaaaaaaaaaaaaaaaaaaaaaaaaaaaaaaaaaaaaaaaaa

SEQ ID NO: 67 - DNA, 2542 bp, Zea mays
  CDS (112)..(2238)
gggaatgccgccttagagaatggccaccatcaggctgaagctgacgcagatgaatggagggaaaaggaagaggacttggccaacaacgggcacagtgcgccaccgccaggcatgcagcaggtggatgagcataaggaggaacaaagacaaagcattcactgggagaggttcctacctgtgaagacactgagagtcttgctggtggagaatgatgactctactcgtcaggtggtcagtgccctgctccgtaagtgctgctatgaagttattcctgctgaaaatggtttgcatgcatggcgatatcttgaagatctgcagaacaacatcgaccttgtattgactgaggttttcatgccttgtctatctggtatcggtctgcttagcaaaatcacaagtcacaaaatttgcaaagacattcctgtgattatgatgtctacgaatgattctatgagtatggtgtttaagtgtttgtcgaagggagcagttgatttcttggtaaaaccactacgtaagaatgagcttaagaacctttggcagcatgtttggaggcgatgccacagttccagtggaagtgaaagtggcatccagacacagaagtgtgccaaactaaatactggcgacgagtatgagaacggcagtgacagcaatcatgatgatgaagaaaatgatgacggcgacgatgacgacttcagtgttggactcaatgctagggatggaagtgacaatggcagtggtactcaaagctcatggacaaagcgtgctgtggagattgacagcccacaacctatatctcccgatcaactagttgatccacctgatagtacatgtgcacaagtaattcaccctagatcagagatatgcagtaacaagtggttaccgacagcaaacaaaaggaatgtcaagaaacagaaggagaataaagatgaatctatgggaagatacttaggaataggtgctcctaggaactcaagtgcagaatatcaatcatctctcaatgatgtatctgttaatccaatagaaaaaggacatgagaatcacatgtccaaatgcaaatctaaaaaggaaacaatggcagaagatgattgtacaaacatgcctagtgcaacaaatgctgaaactgctgatttgattagctcaatagccagaaacacagaaggccaacaagcagtacaagccgttgacgcaccagatggcccttccaaaatggctaatggaaatgataagaatcatgattctcatatcgaagtgacaccccatgagttgggtttgaagagatcgagaacaaatggagctacagcggaaatccatgatgagcgaaatattctgaaaagatcagatcagtcagccttcaccaggtaccatacatctgtggcttccaatcaaggtggagcaagatatggggaaagctcttcaccacaagataacagttctgaggccatgaaaacggactctacatgcaagatgaagtcaaattcagatgctgctccaataaagcagggctccaatggcagtagcaataacgatgtgggatccagtacaaagaatgttgctgcaaggccttcgggtgacagggagagagtagcgtcaccattagccatcaaatctacccagcatgcctcagcatttcatactatacagaatcaaacgtcaccagctaatctgattggggaagacaaagctgatgaaggaatttccaatacagtgaaaatgagccacccaacagaggttccacaaggctgcgtccagcatcatcatcatgtgcattattacctccatgttatgacacagaaacagccatcaacagaccgtggatcatcagatgttcactgtggttcgtcaaatgtgtttgatcctcctgttgaaggacatgctgcaaactacagtgtgaatgggggtgtctcagttggtcataatgggtgcaatgggcagaatggaagtagcgctgtccccaatattgcaagaccaaacatagagagtattaatggtaccatgagccaaaatattgccggaggtggcattgtaagtgggagtgggagtggcaatgacatgtatcagaatcggttcctgcaacgagaagctgcattgaacaaattcagactgaagcggaaagatcggaactttggtaaaaaggttcgctaccaaagcaggaagaggcttgctgagcagcggccacgggtccgaggacagtttgtgcgacaatctgagcaagaagatcaaacagcgcaaggttcagaaagatgacacgtaatttctaatacaacgtatcatcttcttcggcagatctgagaattaggcggttcttcctattgcgcatcttcgtcgacagatctgagaattaagtggtccttcccattgctgatagtagcccactgattcccaacgttagagtacacaataaataagactctagttgtcaatttctgtggttgactgcagatgatcaccctagcgctatggagtcaacaatgtaatatttatatactatgttcgtgccttggcgccttggcggtttgcaatcttcagtttcctttctgagaaaaaa

SEQ ID NO: 68 - DNA, 2382 bp, Zea mays
  CDS (84)..(1976)
cccacgcgtccggcgagaatagggagagatcagacaagctgttgtcggaatccactccggcgaggaggagtgctgaggtcgaaatggggggaggagcggatgaggtggtgaaggtcgtggattcggaggacggcgagggggaggaggaagaggcagaggccgcggcggcggaggggtcgagcaaggagacgccgatgctgccaaggatgccggtgcgcgtgctgctcgccgagggcgacgactccacgcgccacgtcatctccgcgctgctccgcaagtgcggctaccgagttgctgcagcctctgatggtgtgaaggcgtgggacatattaaaggaaaaatctttcaacatagaccttgttttaactgaagttgaactgcctttgatgtctgggttcctcttgttatccacgatcatggagcatgatgcatccaagaacatccctgttataatgatgtcttcacacgactctgtaagcatggttttcaaatgcatgctaaagggtgcagcagatttccttgttaagccgctaagaaagaacgaattaaggaacttgtggcagcacgtttggagaaaacaactggcaaacggcgggcccgatgtgcagcacatacaagaagagaatctcgcagaaagaatggaacagaagactggcgtgacaaaagctgataatttgaacagtgatggtccccataaaaatagagaatgcagtgaacaagaaagtgatgctcaaagttcttgcacaaggtcagagttggaggctgaaagtaagcaaactaacaacattttggagtatatgcaatcaactgaaaggcatttgtttattcgtagccacaaggatttagagctaaatggagagaccaaaacacgaactaagggtaataacttgattccaacaagagaagacgatttattgccaaagaaaagaacatgtttgaatgacaatgattctgagagaacttccagagatatggagctagtccacattatggacaatcagcagaagcatgacacacagagggatgtggatactatgagaacaacatccaggggaaatgatgagaagaactccatcccagcacaccagttggaactttctcttagaagaactgactatggaaaattagagaaccacgagaaaaatgatagaagaacactgaaccattcaacttcatctgcattttacttgtataattgcaggactgcgtccagcttaggaaatgctggtgatggtcaattatgcagcacctcagaaacactagtggatgttgaaaatagaaatggagatttggcagctctgtctgaagacacgactgaaacaaatcgtcctcctatcagagttgtaccatttcctgtccctgttcaatgcttcacatttgatgggcagccgttctggaatggtacaccggtggcatctccattctacccacagtcagctccccccatttggaatagcaaaacaccaacgtggcaagaatcaaccccacaggcaacttcactgccgcaaaaatcgcaacagaatgaaccagttgaaatggatgctaaaccagttgaaaatgcagaggaacaatttgtcgtaggtcctcccagtgccagtgggaagcagctgcatgttgaaattcctaaagatggtctacggcacatttctcctgtgaccggtgaaagtggaatcagtacggtgctagacagcaccagaaatactctgagcagcagtggctgtgatagcacttccaaccggatcaccgcctctactgaaccatcatccaatgtatacaggggcgttcctgaaaccgcaagagccgaaggtttacgacacctgagccagcgtgaggctgcactgaacaagttccggctaaagaggaaggacaggtgctttgagaagaaggttcggtaccagagccggaaattactcgcagagcagcgtccacgggtcaagggccagtttgtccgtcaagatcatagcatccaaggaagctagggtccagttactgagctggaactcttccccattatctaaaaaaaagtcactgtaagtgactccactgcggggtatcctgatgtcaggttttttcgaagagttggaagcaatcacaccgagttacggtttgctgtgtatgtttgctaaagcttgtaatataagtatgtataggctgactcttctttccttaggttaggcacaggacctggcacgttctagacggtttgtcgttagacgttagaaaatacaggcatacttgtgtcctccagtagcacgtcctccagtagcacgtgtgctttaagccttgtattatgtaattagccaaggtgctgtttggttcacgaaatgtaacgtaaagggtaatggtaatggtttacactaaaaaaaaaaaaaaaaaaaaaaa

SEQ ID NO: 69 - DNA, 2232 bp, Zea mays
  CDS (39)..(1931)
ccgctgctgttggattcgccgagccggagccgccggagatgaccgtcgacgagctgaagctgcaggcgagggccagcggcggccacggcgccaaggaccagttccccgtcggcatgcgcgtgctcgccgtcgacgacgacccgacctgcctcaagatcctcgagaacctcttgctccgctgccagtaccatgtgacaacaacgggacaggcagccacggccttgaagctgctgagggagaagaaggaccagtttgaccttgtgatcagcgacgtccacatgccggacatggacggcttcaagctcctcgagcttgtgggcctcgagatggacctcccggtcattatgctgtctgcaaatggggagacacagacagtcatgaaggggattacccatggagcatgtgactacctgctgaagccagtgcgtattgagcagctgaggactatatggcagcatgtggttaggcggaggagttgtgacgccaagaacagtggcaatgacaacgatgattcgggtaaaaagttgcaggtggtgagcgctgaaggtgacaatggcggtgttaatcgcaacaagagaatttcacgcaagggtagggatgataatggtgatgacggtgatgattctgatgacaacagtaatgagaatggagactcgtcgagccagaagaagccaagggttgtgtggtctgttgaattgcaccgaaagtttgtggctgctgtcaaccagcttggcattgacaaggctgttccaaagaaaatattggatcttatgaatgttgagaacatcacaagggagaacgttgcaagtcatctgcagaagtatcggctgtatctgaaaagactcagcgcagatgcaagcaggcaggctaacctaactgctgcatttggaggaagaaaccctgcttatgtgaacatgggactagacgccttcaggcagtacaatgcatatgggagataccggccagttccaaccactaaccattcacagccaaacaacctccttgcaaggatgaactctcctgcatttggtatgcatggtctgctgccttcgcagccacttcagattggacacaaccagaacaatctgagcacttccctagggaatgtcggggggatgaacaacggcaacctgatcaggggtgcgcatatgccactgcaggatactagcaaatgctttcctactggcccttctggtaattcgttcgcgaacatatcaaacagcacacaactggttacgacaaacaacttgccattacagtctcttgagccaagcaaccaacaacaccttggtcggctgcattcctctgcagaccctttcaactcatttgttggtgagcccccccagtttgcagatcttggaaggtgcaacaccacctggccaaccgcggtctcatcatccaatgttcaggagattggccagaaggacaggatcgtgaataggcccaagcttgagcctctctcaagctttacagaagcatccagtcagatccctttgctgggaagtgaaatgcagagccaccaagtagcatcactagccagcaacggtcttccgatgccgttcactcaggaagcggtgcccttcgcttatggaagcagcacgaactcgagagagatgctgaataacaaccttgcgcttagtaattcaggcgtcaactctacattgccgaaccttcgcatagacggttctgttgttccagggcagacactgggtggtagcaattcaggtggttgtgttgtcccccctctgcaagatggcaggattgatcaccaagctgtcagcagtcatctaaactacaacaacgaactcatggggacaggtaggctgcaaaggggacttagtggtggtctggatgacattgtcgtggacatgtttaggccggaccgcgcagacgatggcgtctccttcattgatggggactgggaactggtctagcaagtttcagttctctacatcaagtctgccttcgtgtgagattttccgcatttgtggttgtggaggggttcggcgcttgattggtccaaagttgtttatagtagcaagattgcatcacaaatgccctttgcatttggtttttcagtttagcgaccaggttccagtgtcacgtccgaatatcaactatgtggtatttgctaccttaactcgtatggctatgttttcaagtcaggtgttaactgtggctatcgtgatatatacagcatggttatgagccaaaaaaaaaaaaaaaaaaaaa

SEQ ID NO: 70 - DNA, 2079 bp, Zea mays
  CDS (61)..(1812)
ccttcgccctcccccgcctgcgagcgcgaggcgcggaggggctagcgcgctagcggcgccatggccctgaccgacgccaccgcgttcccctacggcctgcgggtcctcgtcgtcgacgacgaccccacctggctcaagatcctcgagaagatgctccgcaagtgttcatacgaagtcaccacatgcggtttagccagtgttgctatccaaattctccgggagaggagaaacaagtttgacattgtaatcagtgatgtcaacatgcctgacatggatggtttcaagcttctcgaactcattgggcttgagatggatctacctgttataatgatgtccatagacggagagacaagtagggtgatgaaaggtgtccagcatggtgcatgtgactacctcctcaagcctgttcggatgaaggaactccgaaacatttggcaacatgtgtataggaaaaaaatgcatgaggtgaaagagattgaaggtaatgacagctatgatgatctccaaatgtttagaaatggtgtagagggattcgacgagagggacctatttatgagagctgactctgatactatgaggaagagaaaagacgtgaataaggaccatgcagatcaggactcaagtgatggagctactgttaagaaggctagagttgtctggtctgttgaccttcaccagaaatttgtaaatgctgtcaaccaaattggatttgacaaagtcgggccgaagaaaatactggatcttatgaatgttcctggcctgacaagagagaatgtggccagtcatcttcagaaataccgcctctacttgagtaggttgcaaaagcagaacgaggaaaggataatgggtgctgctaggcaagatttcaatcaaaagggaccatcggatcatcttaacctccgaagttccttccaagagcaaccaggcaacctttccaatggatgtcagcatagttctcagaaggtcgaagctcagaccaacattctcgatcctcatctggacgacacgaagacttcaatgcccttgaaggtgccagataaaaatggaatttcagcaagtgatgctgttgaccctcacaatatcaccactgcttcacctttaagtggggtgttctcttttgaaagaatgccagtgaatcaggacaggaagctatcagaaaccatgatcttggaatgtgagtcctggagtggaagtgtgccaccaaagcagttcatgcagtatccaaagcataaccatgagcgctgcgaccttctaggagactattcttgcttgcctaaaccggacttggagcacccaattgcccctggtcatctgtatgccccaccgccagtaatttcgatgagttacaatgtggagaaagatgtcagagacttctcagatgtaaaaccagatcttcttggctgtatgaagtccttatcaccagcactgacatgtacagttgagtcggtttctgctcaacttagtgacagtgttgtgacctcaactaacagtgaccggaagttttccagcgtggaggggttgtccagcattaaagattgtgactttgatcaggaaaggaacggagctattttgtttacttcagaagaggcaagtatattatgcggcactgattttacttgtctacctgaagacctgtccggctatcaacttcaaggtgtctccttcgggaataaaggattgaacagcatcgatttatatcagtgcaatgatacaatgttaatacctggactgcagaataattggtatgatgatgatgtagagtttagcagtgaaaccgtggagttcccattgctagacggaggcctgtttgcataaatgcctcatctggccctatctttcaaccatgcccttatgtcagcagggatgatgttcattggtatgttcccctatagcgcctcctgtagggctatatttaacctaacttgatcctgtggtggaaggatttaatttgtagtctcgccacttttgataattgtctgtattatagactgtgccatggcacaatgactgcaatatatactcttcacggtgatcaaaattacatatgaagactgtcaaaaaaaaaaaaaaaaaaaaaaa

SEQ ID NO: 71 - DNA, 1708 bp, Zea mays
  CDS (391)..(1116)
caactcatcgggcgcggagaccaccgcggggggaaaagcgagggaggggggagaggactgaagagaaatcatggagccgatttgctgtggagattcgggcgcgtgatccggtcggatcttgctttcccggggggcgatcgaggccacgccgctgctgccgcggtgccctccctctgcctctgggctctgcgtgtgacgtgccgtgccatggcgctcgccctcgcctatatccccagcctccctcgccccgccgctggccgccgcattcagtaaaaagccacctaccctaccctcctgcgctggtactacttactacctagccaggccaaggagcccaacgagggggaacgctgcggtaggcgcgcgctgctcgtcccaccccacgccgccatgacggtgccagatgccgagtcgcgcttccatgtcctcgcggtggacgacagcctcgtcgacaggaaactcatcgagatgctgctcaagacctcgtcctaccaagtgaccacggtggattccgggagcaaggcgctggagctgctggggctgagggacgcgtcgtcgccgtctccgtcctcgcctgaccaccaggagatcgacgtgaatctcatcatcactgactactgcatgccaggcatgacaggatacgatctgctcaagagagtgaaggggtcctcctcgctcaaggacattcctgtggtgatcatgtcgtctgagaatgtgcctgcccggatcagcaggtgcttgcaagacggcgcggaggagttcttcctgaagcccgtgaagctggccgacatgaagaagctcaagtcgcacctgctgaaacggaagcagcccaaggaggcgcaggcgcaggcgcaggcgcaggcgcagcagggacaggcggtggagctggagcctgagcagcagctggacccgcgcacgcagccggcgcacgacgcggaggaaaccgcggcagagccgccgccggccgcatccaacggaaccaccgatggcggcaacaagaggaaggcggcagccatggaggaggaggggatgctggccgtgatgacggtggcggcgccggagagcagcaccaagccgaggctgtccaccaccaccagcagcctggcggtggaaacctgagctgagaatcggacggcgaccggatcacatactactacctacgtacattaatccaccattgcgggcagtcgagaggcaaccaaccaaccaagaaccaaccgaccaaacccaggccaccgccgagaaagagctcgtcctccttttctttcgctggttcttttggttctcggagctaattaatggaatgaaggtgtgagctcctggggatggaggggcggttacgggctctaagtgaagaacaattacgacgtaccttacctagcggctgctgcttcggccggcaaattttgttgtgctcgtggtcatggacacccttgtgttcgttaggagggggtcggggtggaacggtgaaaaggaagctgtagatagaaaaggcaggcgtctcatgctcttgttgtctagtctaatttttaattttactcggcttattaatcacggtactgactagctgccaaaaaaaaaaaaaaaaaaaaaaaaaaaaaaaaaaaaaaaaaaaaaaaaaaaaaaaaaaaaaaaaaaaaaaaaaaaaaaaaaaaaaaaaaaaaaaaaaaaaaaaaaaaaaaaaaaaaaaaaaaaaaaaaaaaaaaaa

SEQ ID NO: 72 - DNA, 1395 bp, Zea mays
  CDS (335)..(1066)
cctgacaccatactatacctccccctccccggccctgtcctactagccgtcagaggtttgccgcctcctcgctcctcgtcttcatcactctctctctctctctctctctcttccttcgtcctcgacctgtggccacctgtggcgtcacgctttataagagcacgcggccggcaaccatctcccttgccacccacaagtagagaagaatcttttgttgctgacgcctgagacgctggcactgccgccgcgccgtctggagagaaagagcagagggacactgaagcagaggagccgaggggtagcgacgagagacgagcgagagcggacgacggagatggaagcaggaggagcaggagcggagggggtgatgagggtgctgctggtggacgactcccccgtcgaccgccgcgtggcgcagctgctcctcagcagcaactcctgcgccggctcattccacgtcatcgccgtggacagcgccaagaaggcgatggagttcctcggcctcaaggacggcggcaaggagcaggccatcgacatggtgctcacggactactgcatgccagagatgaccggatacgacctgctcaaggccatcaaggcactgaacccgctgaagccgatccctgtcatcgtcatgtcgtcagaagacgagccccagaggatcagccgatgcctgaacgccggcgccgaggacttcatcgtgaagcccctgcagagcaaggacgtgcagcgcctccggaactgctccacggtcgggaggcccagcaacaagggcggcgccacgttgccgtgcgaggagaacgccgtggccaagtggagtaacaacaagctgccgccctccgccggcgccggcgccggcgccagcgccacgtcgccgtcgggacggcgggcgaacctcgccggagtcgccatgcgccaggtgctgcactcgtcgagcgtggagatctcgcagtacctgccgctcctgctcaagctcgtcgtgctggcgtacgccgcgctgtgcctgggcgagctcctgcacagatggtcgtcgggcggcagctgctcgctctccccgtggtgcgcctgatcaggaaggagcaagcagcgcaaaaagccagcaacggtgcaagagccccccctgggcaccgacgacaggagactgctgctgcaccaagcattatttcaggctccaatagccctagtcttttaatttaggtagagattgtctctgctctgagatcctaaccggggtttcgaccgatgatgagtccccccgtggcttttgttcgttgatttgaggggccgtagacgtaggaaggaggaggaactgaacgaaccccttgtatcctctgctctgtatagaatgaatgaatgaatgaatgaatcagaatgcaacgcgtcaaaaaaaaaaaa

SEQ ID NO: 73 - DNA, 1214 bp, Zea mays
  CDS (55)..(759)
cggacgcgtgggtcctccaccaccattcatcagaaagcgaagcacaagcctctgatgccaagccaaagcacacacacctcctccagcctttcttcctctacagccccaattcttccctgcagctctgctgctgccttgtttcgatcggtcatggcggcggtggccacagagactccgttccatgtcctggcggtggacgacagcctcccggacaggaagctcatcgagaggctcctcaagacctcttccttccaagtgaccactgtcgactccgggagcaaggcgctgcagttcctgggcctccatgaccaggatagcacggttcctcctgtccacacgcaccagctggatgtggctgccaatcaggatgtggctgtgaacctgatcatcacagactactgcatgcctggcatgacaggatatgacctgctcaagaagatcaaggagtcgtcgtctctcagagatatcccggtggtgatcatgtcctctgagaacattccttcaaggatcaataggtgcctggaggaaggagctgacgagttcttcctaaaacctgtgcggctatcagacatgaacaagctcaagccccacatactgaaaagcagatgcaaccaggaacagcaccagcaaagtgacagtcacagtggcgaacgcaggaaccccacaatcagcagcagcgatagcataaacaaccgcaagagaaagggtgcaggcaccgaagaaatcttgccccagctggcaaacagatcaaggcacagttaactgagaactgactagtacagctaaaaccttttctttttcactttactttggcctactgatttgtaacgtagatgttagccctggatttgcaaaacggaacggaatctgtaaactgatactgcttgagtcgaatcgatcgaagtgattctgcaccagatctccctatttcatttatcagaatcgaaagccagctgacagagtcacagtaacagcccgttggacatagcagcaggtgccgaagccaagaacatctgaaactgaccgtcggataacctacgatgggagtagccttttactgcttctaagctttagcctggatacaagttgtcactacagtagtcagtagggcagtaacttggtgcatctccaagagttttcaaaacacactgtcaatctagaaatttttggtgaaaaaaaaaaaaaaaaaaaaaaaaaaaaaaaaaaaaaaaaaa

SEQ ID NO: 74 - DNA, 975 bp, Zea mays
  CDS (154)..(624)
gactagttctagatcgccgcaactgcccgtctgctcctgcttttcatccagtcgcaaaacaaagagaagagatctccgcgtccgcaaccgcatcgcttccctcccggcagaagaagaagattcggttgggttgtttgtctcttgcaaaccgcaatggctgctgctgccactgctactccggccgtggcgccggaggccggcgaccggaaggcggtggcaccgccggtcgacgcggtggatctggagctggagctggaggagaagcacgtgctggcggtggacgacagctccgtggaccgcgcggtgatcgccaagatcctacgcagctccaaatacagagtgacgaccgtggactcggcgacgcgcgcgctggagctgctggcgctggggctggtccccgacgtgaacatgatcatcacggactactggatgcccgggatgaccgggtacgagctgctgaagcacgtgaaggagtcgtcggcgctgcgggccatcccggtggtgatcatgtcgtcggagaacgtgcccacccgcatcagccggtgcctggaggagggcgccgaggacttcctcctcaagcccgtccgccccgccgacgtctcccgcctctgcagccggatccggtgaccgcccgcgcaaggatggaggatctggttgcgcgctctgacttaattagaggagttgttaggatccaattttttgtgtgttcgttcgttcgttcgttcttttctttctttcttcttggacatagatctgctgccgccgctgctgccgtcgactgaaacaagaagctaacttagttttagggtccaggttgttgttgttgttgttaggaaggcgagtcgttgggggcattcacggatgttcttcctcgtttcccctccctccgtgcctgaggctgcaaaaatatgccccccagacatgaaaaaaaaacaagacctgttaacagttccaaaaaaaaaaaaaaaaaaaaaa

SEQ ID NO: 75 - DNA, 2229 bp, Zea mays
  CDS (374)..(722),(791)..(2019)
caacagagaagagcggacgccaccggacgccaccgccgccaatcaatagattaggcgcggataatggtgctggccggaccgcgacgggcggaggagggcgccgcggcccccgcccgccgccgctgacagagtatacctgcttaaccagccgtctgcaggcacggcgcacgcgcggtggtacctcgcgaggggctcgggttgactgggcgctactcgtggccgcggggatggaggaggaggcgtctgcagatccaccgaccgcttcgtcctgcaccggcgtctctggttccggccgctgctgaatccgacgcttcggttcgcgtccccagtccccttggcggaggcgtggatcgtgtgtttggggggtttgggtatggtgggcggcggtgagggggatcgcgtgggcggcggcgtaggggttgggggaggccagcagttcgtggaccgcagcaaggtgaggattcttctctgcgacggcgacgccagcagctcccgggaggtgctgcggctcctctgcaactgctcgtaccatgtaacttgcgccaagtctccgcggcaggtgatcaatattctcaactacgagggcggcgagatcgacatcatcctggctgaggttgatctgccggtctccaagtgcttcaagatgctcaagtacattgccaggaacaaggacctgcgccacatccccatcatcagtaggcagccttcctattctgagccttgtgcggttgtgcctattactgtgatgtgctttctgtgaccgtcctccctgtcttatggaactgtgcagtgatgtccaacagagacgaggtgtctgttgttgtcaagtgcttgaggcttggtgcggccgagtacctggtgaagccgctgcgcacgaatgagctgctgaacctttggacccatgtgtggcggcggagacggatgcttggtttgcccgagaaaaacttcttcaatgacaacttcgagttggtgctctcagaacctagtgatgcaaataccaatagcgccaccctcctctcagatgagacagacgacaggcctaaagaaaacacaaatcaagaaacgggcacctcaaatcagcttgaatacgagtctaatccttccgttgctgagcgcgaccagagagacaagatcggtgctccaggctctgccctagatgccagtcaatcatcgactccgggaagaatgttttcacgtcctataaaaactaacctgaaggttgctgagtcgtctgcatttctagcatatgttaagtcaagcaccccagccaccagttcatttgatagcggactacaaagaggtgacagccggttagattctttggataaccatggtaattgctctagtgcaacagatagaagtgacaccggtactgatgtaaatattcggaataaagaagcttttgagatgcctgtgcagtatcctatggtatgcttttcttcctctagcatgcatatggagcgaagcaatgaaggccataatgacacttcaggaactccacctgcataccatttcccattttattatccagggatggtagaacacaacatggcactttcatcagtgcaaaattttcaagcaaacataaacagtgctcaagcacatacaccaccagcgatgcttcatcagtacaatgttttctcccaatgccatagtttacccatgatatcaccatttcagtttaatacttctggcatgagtatgcactcaagtcatttaccgacgcaaaatgtgtggtcatcggcatcgagcacaccaacgcctgacgaaacatgcaatcgctccgagagaagggctgcagcacttgctaaattcaggcagaaaaggaaagagcgctgttttgacaagaaggtgaggtatgtgaacaggaagaaacttgctgagacgaggctaagggtgcgaggtcaatttgttaggcatgcaagcaatatggatatcataagcactggagatgacatatctgaagacgaagatgacgatccaacctccagggaggtagatatgatttcttctccagagtagtggagaggtcctcttgtgtgaaaaattagagtgcagatggttactgctcactttgttacaactcagtaggactagacaatacattcttctactggcaacaaggcaatacaccctttttgctcacacacagtataaacttttgtccccaaatatctggctgttactccggttgctttaatcgagaaatcatctttttgataaaaaaaa

SEQ ID NO: 76 - DNA, 1184 bp, Zea mays
  CDS (74)..(1036)
ccacgcgtccgcggacgcgtgggcggacgcgtgggttttcacttgacatcccccgtcccatagatcgccggcgatggctccggccgtttccgcggcggcgtcggcggcgatgaggcaggcactgcgggaccggcagatcctcgatgccgtgggcactggcgctgcggcgctctcgctggcaggctcttccttcatcgtgatctgctacctcctcttccgcgagctccgcaagttctccttcaagctcgtcttctacctagccgtctcggatatgttttgcagcttattcactatattgggggggccatcgaatgcattttactgctttgcacatgactacagtgcccatttcttctgtgtggcttcttttctatggacaaccaccatatcattcactctgcatcgcacagttgtaaaacacaaaactgatgttgaagaatttggatctattttccacttatatgtgtggggaacttcactatctaccactgtattacgttcgataggaagtgactatggaagaccaggcacctggtgctggattcagcagggaagcatggcaaaggtcctacatttaataaccttttatcttccactttggggtgccattttgtacaatgggtttacatactatgaagtaaaccgcatgctgaataatgcaacacagatggctgctggcataagtgatcgatcaaatcagtctgacattagggcagacaggaaggcatttaaccgatggggttattaccctctaattctaatcggttcatgggcttttgcaactatcaatcgtctttatgactttgccaatccagggcacaggatagtctggctctcctttcttgatgttgggttcgctggacttatgggcctattcaattccattgcttatgggctaaactcttctgtgcgccgagctatttcagagagaatcgacacgttcctacctgagagaataaaaaggagcctccctgctttgtcaaggctgaggagtcaacaggaaaatgaactcacttctcttatcgttgagggtaactgatatgtaatggattttccatgcacacgaagctttttttttttgtttatctgttcgttcatcaatctccaacaagggaatgcaacatcactgtaggagcagtgggttagtaacacgtcgaattggttcaaaaaaaaaaaaaaaaaag

SEQ ID NO: 77 - DNA, 1794 bp, Zea mays
  CDS (122)..(1594)
ggcagccagcaggggaggaggacacgaatcgtagtcggcctcccgcccgccccggcaattgttgttgctgctgcgcgcagggcggttctggattgcggtctgccccacccacgaacaatccatggctccatctccgcctcggcgtgctgcgctcctcctcaccactgtgcttctgctggcggcggccgggtccacccccggcgccacggctgctggcatcttccaggtgcgccgcaagttcaccgccggggtgggagggggtgctggcgccaacatcagcgcccttcgcgcccacgacggcacccgtcacggccgcctcctcgcagccgccgacctccctcttggcggcctcggcctccccactgacactggcctctattacacggagatcaagctcgggacgccacccaagcactactacgtccaggtcgacaccggcagcgacatcctctgggtcaactgcatcacctgcgagcaatgcccccacaagagcgggctcgggttagacttgacgctttacgaccccaaggcatcctcgaccgggagcatggtgatgtgcgatcaggcattctgtgcagccacctttggcggaaagctgccgaagtgcggcgccaatgtgccctgcgaatatagtgtcacctacggtgatggtagctcgacgataggttcctttgtcaccgatgcgctgcagtttgatcaggtgactagggatgggcagacacagccggctaatgccagcgtcattttcgggtgtggtgctcaacaaggtggggatttgggaagttcaaaccaagcccttgatggaattcttggttttggtgaggcaaatacatcaatgctatcacaactaactaccgctggtaaagtgaagaagatatttgcccattgtttggataccataaaaggaggtggaattttttctattggagatgtggtgcagccaaaagtaaaaacaacgccattggtagccgacaagccacactacaatgtgaaccttaagacaatcgatgttggtggcactactctacaactcccagctcatatttttgaaccaggagaaaaaaagggtaccataatcgacagtggtaccaccttgacataccttccagaattggttttcaaagaagtaatgctcgcggtatttaacaagcatcaggatataaccttccatgatgttcaaggttttttgtgtttccaatatcctggaagtgtagatgatggattcccaaccatcacattccattttgaggatgatcttgcactacatgtgtatccccacgagtactttttcgcaaatgggaatgacgtatactgcgtgggattccaaaatggtgcatcacagtcaaaggatggaaaggacattgtgcttatgggagatcttgtcctttccaacaagttggttatctatgacttggaaaatcgagtcattgggtggactgactacaactgttcgtcgagcattaaaattaaggacgacaaaacgggcgcaacatctactgtcaattcacatgacttgtcctcaggatggaagttccactggcacatgtccccggttctattgttggtaacaacggtgtgcagttatttaatatgctaactccactgtaaaggaaatccatctggttcgtatatcctttccacgaaaaggatcggagagatgtagggctttctttaggttgtgttctcccaccacggaaaacaatggaaacagaaaacactgtaatgctttactgagccattgtttaactaggtaatgctgaggtgaggtaatgttctgtcatttctttgggaaaa

SEQ ID NO: 78 - DNA, 1937 bp, Zea mays
  CDS (76)..(1605)
gctcctctcccaccaccgcccccgccgtcgcctgctgttccatgaaggactaatccgtcggtccacttctcagctatggcgcagctcgcggtgcggtcgctgctgctgtccctgctcctggtctcgccagttgtggcttcacctggtattgtgaagctcaactcgtcgtcgaccctcttcggcatcgagttcccgccgttcaacaccgccgtcgccgcgaccggctgcgacagcaagctggttgcagccgacgaggcgggggatgagcagaagcagccggcgagctcgtccccgtcgctgcagctgcgcatgaagcaccggtccgcggaggggggcaggacacggaaagagtcgttcttagataaggccgagaaggatgccgtccgcatcgagacgatgcaccggagggcggcgcgctccggcgtggcccggatgccggcgtcttcgtctccgcggcgggcgctgtcggagcggatggttgcgacggtggagtccggcgtggcggtcgggtccggcgagtacctgatcgacgtctacgtcggcacgccaccgcggcgtttccggatgatcatggacaccggcagcgacctcaactggctgcagtgcgcgccgtgcctggactgcttcgagcagcgtggcccggtgttcgaccccgccgcgtcctcctcctaccgcaacgtcacctgcggcgaccagcgctgcggcctcgtggcgccgcccgaggcgccgagggcgtgccgccgccccgcggaggactcctgtccgtactactactggtacggggaccagtccaacactaccggcgacctggccctggagtccttcacggtcaacctcacggccccgggcgcgtcccgccgtgtggacggcgtagtgttcgggtgcgggcaccgaaaccgcggcctcttccacggcgcggcggggctgctggggctcggccggggcccgctgtcgttcgcgtcccagctccgcgccgtgtacgggcacaccttctcgtactgcctggtggagcacggcagcgacgccggcagcaaggtggtgttcggggaggactacttggtgctggcgcatccgcagctcaagtacacggcgttcgcgcccacgtcgtcgccggcggacacattctattacgtgaagctcaagggcgtgctggtgggcggcgacctgctgaacatcagctcggacacgtgggacgtgggcaaggacgggtccggcggcacgatcatcgactccggcacgacgctgagctacttcgtggagccggcgtaccaggtgatccggcaagcgttcgtcgatctcatgagcaggctgtaccctctgatcccggacttcccggtgctgaacccgtgctacaacgtctctggcgtggagcgaccggaggtgccggagctgtcgctgctgttcgccgacggtgccgtgtgggacttccccgcggagaactacttcgtccggctggacccggacggcatcatgtgcctggcggtccggggcaccccgcgcaccggcatgtccatcatcggtaacttccagcagcagaacttccacgtcgtgtacgacctgcagaacaaccggctgggcttcgcgccgcggcggtgcgccgaggtgtagtgtatagccgccggcgaggcctcctgagactgagaggacgaacaattcgaactcagtcctcgcttgattgattggattgggaggcaaattgggtgtagaaatttttggttgggaaggacggtggcacgtacgcaagctctaatacatagttttttttgttgcatttatctccaaggagagaaggttagggatattttattaaggaccgtgcaggtgggttgtaacgggaaaatactgattttgttcccatgtacaatacccgtttcttcactcaaattttagaaattgtaagttgtagattaagaatgagagtgcacacaaaaaaaaaa

SEQ ID NO: 79 - DNA, 1830 bp, Zea mays
  CDS (195)..(1628)
attcggctcgagcgccaaacggaccaagaatttccacgcagatttcaacagagatgatgggctcgcccgccggtgctggtgcactcgcccatgtctcgcgcgtcgcaccgccgaggacggcgccccgattcgtcctccttatttaggcaccgtcttttgtcccccccatccgttccgagccgaaccaaggcgccatgagctccccggccgtgcgccgcgtcgtactcctctcgtcactcctctgcgccggagcgctcggtttcttgccctgctcccatgccgccgcggtggcgcccggctacgtcgccgtctccgccgccagcttcgtgccgtcctcaacgtgcagctcccccgaccgagttccgccgcaccggcggaacggcacgtccgccgtgctgcggctgacgcacaggcacgggccgtgcgccccctcgcgggcgtcctcgctagcggccccgtcggtggctgacacgctgcgcgcggaccagcgccgggcggagtacatactgaggagggtgtcggggcgcgcgcctcagctgtgggactccaaggcggcggcggcggtggcgacggtgccggcgagctgggggtacgacatcggcacgctcaactacgtggtgacggcgagcctcggcacgccgggcgtggcgcagaccatggaggtggacaccggcagcgacctgtcgtgggtgcagtgcaagccgtgcgccgcggcgccgtcgtgctacagccagaaggacccgctcttcgaccccgcccagtcgtcgtcctacgccgccgtgccgtgcgggggccccgtgtgcgcggggctgggcatctacgccgcgtccgcctgctcggcggcgcagtgcgggtacgtggtcagctacggcgacgggtccaacaccacgggcgtgtacagctccgacacgctgaccctgtcggcgagcagcgcggtgcagggcttcttcttcggctgcgggcacgcgcagagcgggctgttcaacggcgtcgacgggctcctgggcctcggccgcgagcagccgtcgctcgtggagcagacggcgggcacctacggcggggtcttctcctactgcctcccgacgaagccgtccaccgcggggtacctcacgctgggcgtgggcgggccgtcgggcgccgcgccgggcttctccacgacgcagctgctgccgtcgccgaacgcgccgacctactacgtcgtcatgctgacggggatcagcgtcggcgggcagcagctcagcgtgcccgcgtcggcgttcgcgggcgggacggtggtggacaccggcacggtcgtcacccgcttgcccccgaccgcgtacgcggcgctgcggtccgcgttccgcagcggcatggcctcgtacgggtacccgacagcgccgtcgaacgggatcctggacacctgctacaacttcgccgggtacggcaccgtgacgctcccgaacgtggcgctcaccttcggcagcggcgcgaccgtcacgctgggcgccgacgggatcctgtcgttcgggtgcctcgcgttcgcacccagcggcagtgacggtggcatggccatcctcggcaacgtgcagcagcgctcgttcgaggtgcgcatcgacggcacctccgttggcttcaaacccagctcctgctaactcatggattaacagtcggcgacttgggatcactactagtagtagtatatgcacgtacgtagacgagagtgcagagatacatacaaagttactgtacatgatgatagtaaagataaacttgcaggagagcgtataccatacacagcacacagcagtagcggtggaagttctttcgttggtggaaaaaaaaaaaaaaagg

SEQ ID NO: 80 - DNA, 1558 bp, Glycine max
  CDS (80)..(1117)
attcggctcgagccctaatccaccctttctgaacaaaaataaaaaaataaaaaaaaacccatcgatttcttggacctccatgacttctttgtctacccatcacacctatagccgaaagcaaaaatctctcggcctcctctgcaccaattttctgagtttgtacaacaaagaaggtgtgcgcctggtcggtctcgatgacgcagcttcgcggttaggtgtagaaagacgtcggatctacgacatcgttaatgttttagagagtgtcggtgtgctaaccagaaaagctaagaatcagtatacttggaaaggattttgtgcaattcctgctgccttacaagaacttaaggatgaaggtttgaaggagaatcctggatcatttgatgactccaatgacaatgcaaaagtgtctgatgatgaggaggaggaagaagaaacatttcctaatattaacattgggagtcagagtgagaaggaaaatcctgattacactgctactgtcaaatcctccaagaatgaaaacagaagggaaaaatctctggcattgcttactcagaattttgtcaagctttttgtctgctctaattttgaaatgatctcccttgacgaagctgcaaagttgttgcttggaaatgccaacaatagaacaaaagtcagacgtctatatgatattgcgaatgtgttatcctccatgaacctaatcgagaagacccatacaacaaacacaagaaaaccagcattcaggtggttgggtgtgaggggaaaaacatggggtggatcagttgacttggctcaaaattcaaatgtcaaagagtcacggaaaaggatgtttggaactgacattggaaacataagttttaaaaggaacaaagttgatttgtccatggatggccagaattctaaaatgcaaaatcaacacgaaaatattagtccacgagctcagttagagaaaatcatcataaaaaaagatgctaagcagacttcagagagctatcagtttggcccttttgctccagcttatgtgcccaaagttggaacctctgaaaataatagtgtgaaaaaggtgcatgactgggacagcctcgcacaggagcatcgtcctcaatatcaaaaccaaggttagagctttaaaagatctattttcccactacatggaagcatggaaatcttggtactctgaagctgctgggaaaaagtcaacgaaaactttataattgacttgtccaaagtcagtccagataattgtagcttttctagaaaataaatgatccattactgagtgtatgttccacatatgttggcatattctcaaaatgaaatgatccattactgaatgcatgttctccatgcgttactgtattctcaaaagaaaatgatccattgttgaatccatgttctccaggggttagcgtacagctaccctgtgctgatttattaaccgtcacatgtcatgttaaagatcagttaacagttcttatagattatttatcatgttttttataaaaaaaaaaaaaaaaaaaaaaaaaaaaaaaaaaaaaaaaaaaaaaaaaaaaaaaaaagg

SEQ ID NO: 81 - DNA, 3996 bp, Zea mays
  CDS (243)..(3371)
cgtagcactgccctcttcctctctgtcctctcccctgctgccgccccctttcccaaatctggccgcacgacgcaccagccaccaaccgcacacaccccaaacttgaaggcacaacccgagcgctcgcccgcctcgcctctgcgccgcgtccggccgccggtagcgggccggtcacttaccgggagggagaggtgctttggttcctggatgagctgtgaaggaactgggagcaagaagaattgatgtttactccgcagggcaaaggatggaccggctggtcgacgccaactccggccaaccagcggagcggtggtggggctcctgctgcgtcggcgccccttggaaagggcaaaggaagggtcgccgagctcgagcaggagttgcatgaatatcagtacaatatggggcttcttttgattgaaaagaaagaatgggcagcaaaatttgaagaaatcagtgaagtgctgacacagaaagaggagatactgaagagggagcaggcggcacatctgaatgctatatcagagtatgaaaggcgggaggagaacatgcggaaagcactaggtgttgagaagcaatgtgtcgctgatcttgaaaaagccttgcgtgatatacgagcagagatagctgaggttaaatttacatctgagaaaaagataacagatgctcagtctcttgaggctagtttggaggaaaaatccttggagatcgagggaaaacttcatgctgcagatgccaaacttgcagaggcaaaccgcaagaagtctcaagctgaccgtgatttagaagaggcggaagctcgtcaacgtagactggagaaggagaaactgtattttgagacagagcggaaggcccgagaaaagcaacttaaggagcaggaggaatcactgcaggaatgggagaaaaagctgaaggaaagtcagaatagacttaatgagttgcagagatctataaatgagcgagaggagagagcaaataagaatgatcaacttttcaagataaaacaggacgaactggaggaggcacgaaggacagtggaggccgctaaagttactctgaaagtcaaagaggatgatattaacaaaagactaaatgaattacatttacaggaaaaggatgctgactcaaagcgcagtgcattggaagagcaggggaaaaaattggatgagagagaggcaaaggtcactaatagagaaaaggaggggctccagaagcttcttgaggatcatcaggtggagcttgaatccaaaagacgggattttgaattagaattagagagggaaaggaaatcttttgatcaaaatatgacacagaagcaagcggatttattgaaaagggagaaagatgttaaatctttggaggctaaactttctaaaagtgagcaggcattgaatgataagaagaaatcaatggaaaacttgcagaatgatcttgatgccaaatctaaggctctgaagagttgggatgaatcattgaaaaatgacgagaaaaggttactgaaagaaaagcagcaaatggatcatgaaagagaacaattggagacatacaaattggagcttgaaaagatcaaatcagcattagaagctgagaaggaaaaaatatcagaagagcagaataatctgaaactcacagcgcaagagaggcaggagcatagcttgttgatagcaaaacttaagaaggagattgaggaatacagaatgcgaagcaactccctatctgaggaaatggaggatttaaggaagcaacggcagaaatttgaagaagagtgggaacaactagacgaaaagagagccctccttgtagaggaggacaaaaggttgaacattgagaggatgaatttagaacggtggcgtgacaacgaagaaaaaaggttaaatgatatgaaactcaaaatggatgaagaatacaagcagcagctggagagtcttgagcgcaaggaaaaggctttgagtgatgatatgaagcacaagcaaatggaaaatgatgaatttctgaagggagaacgtgctgatgttcaacgtaaattgcaactcaaacggcatgaattggagatggagatggagcaaaaacaagccacgaaggagaaggaactggaagaaaaggaaaatgagttaaataagaaaatagattttgtggaaaataaactccgacatgcaattgagttgaatgagtccaagattgagaagttattattggagaaaagggaggtgcagatggaaagagaattactgctggaggaaagaaagaaaacggagactgacaaggcagatattagaagggatattgagagtctgcactcattgagcaagagtttgaaggaacgtcgagaggcatataacagggacaggagcagactcatcgaactatttgaaaagtacaaggcgtgcaaaaactgtgggatttctatttttgagggattggattctctgctgcttaaagacagtgctgaaattgagcatccaagtttggctgttgagggagatgatcatgccttgaccaccgatacatcaggtccagatacaggaacccttgttaattcaggtggtcgtttttctttgttacagaagtgttcaaggcttttcaagttctcccctagaaaaaagggtgagcagtcatcagaacaaccatcagagaggaatatatcttttggtgcaagactcgaggaagcaacacagagcgatggagattatgtgccaactcctgtctatgagatagcccacgattctttcaatgcagaggatgagctcccttctgacggtgaaaccagggagaatgaagagtctgaaaggcatgacatagctgataatgcccagatggagtcttctgttggtgtagcagataacagtatagatattctcggtactaagtcatttgatggtgctaacgacatggcagttgaagcaactattgtctctgttgatcaaaatggcgaggactctgtagttcctgctgaagcaggtgtagagcctgaaacatcagagcaaggtcggcgccagcaaaaccagagaggcagaagaaaaggtggtatgaaaagaacacggtctgttaatgctgtagttgaagatgctaagatgatacttggcgaggtttttgaggagaagactgatgatcagggagatacagtcaaggtgggtgctacacgaaagcggcggtttgctggagctacaataagtgaacaagatgaagaagggagcgaagcacattcagaaagtgtttcacttggagggcagcgccgtaagaggcggcaaactgctggggcagtgacagatgccccaggagaaagacgttacaatttgagacacagtagagctgcaaatgctggcgctgcaacagcccaagcagacaaaaaaaaaatcttcaaaagcaagaaataaacatacagtagaagcttctgctgatgacaccgaaggaacatcaaaggttgttgaggaacctgcccctgagagcaagagggtatctgaatctgcagactacgatgcatcccagttgcatgagttttcccaggttgaagttggtgatgcccatgctgtagacggtgagggtgctggtgaggaagatggtgatattttggatggccaagatgcactgcctgatgtgccaatgacaccttctggaagcgagtttggagcggaacaggaagatgaggacgatgatgattcagagaggcgaaaccaatcaatcagcaagaagctatggtcattcttcactacatgacttgctgaagaggtcgtcatgtaggttatttctagcttttgtggtttcgattcatgataccccattcttggaactgtaggtcgtgtgcttttggtgattatgtactagatctcccacttgattgtgcttctctcccgtgtaattgaaatatatttgtagtggacatagtttgatggcactcacagaagtagctgatgagatgtacaatggcgatgatggtatgccctgtaaggctgtaacaccagtagcttggtttgtaaaaaaaaaaaaaaaaaaaaaaaa

SEQ ID NO: 82 - DNA, 1984 bp, Oryza sativa
  CDS (93)..(1403)
ctggatctatggagtacatcgagacagtcccactaaaccagtaaggatgggaatatggtgtttgtttgttctttatatgttgtctagcatccatggattctgttgttaggacccacattggtcatatgcttaagatgatacatttttgttctatgtttctcattacttttagcgactataaaatacaagctattctctcttcacagcaaaaaagaaaagcaccagaagaaagtgatgttgctgagtctagcgactgtatgattactagccctggatttgctgtcagtccaatgctcactccagtctctgggaaagctgttaagacttccaagtcaaagactaagaacaacaaagctgggcctcagacacctacatcaaatgttggttcaccacttaatcccccaactcctgttggtacatgccgttatgacagttcgttagggcttctcacaaagaagttcataaatttgctgaagcaggctccggatggcattctagatttgaataatgctgcagaaacactagaggttcaaaaacggcgtatatatgatattaccaatgtacttgaaggaatagggttgattgaaaagacactcaagaacagaatccgttggaagggcttggatgattcaggagtggaattagataatggtctttcagctttgcaggcagaagttgaaaatcttagtctgaaggagcaagcattagatgagcgcataagtgatatgcgtgaaaaactaagaggtttaactgaagatgaaaacaatcaaagatggctctatgtgacagaagatgatatcaagggattaccctgctttcagaatgaaacactaattgcaataaaagctcctcatggcactacacttgaagtcccagatcctgacgaggctggtgattatctccagagaagatatagaatcgtattaagaagtacaatgggcccaatagatgtctacttagttagtcaatttgatgagaaatttgaggacttgggtgggggtgcaacaccatcagggcatgcaaatgtaccaaaacatcaacctactgaagtcttcaatacaacaaatgctggggttgggcaatgtagcaactcagttgctgtggacaataatattcagcacagccagacgattcctcaggatcctagtgcttcacatgattttggaggaatgacaaggattatcccttcagatattgatactgatgctgattactggctcatatcagaaggggatgtcagcattactgatatgtggaaaacagcaccagatgtgcagtgggatgagagcctggatacggatgtcttcctatctgaagacgttagaacgccaagttcacacaatcagcagccatctgcagtgggcgggccacagatgcaggtctcagacatgcataaaccctaggatcacaggggttacagaagtgaaaagatgacatctggaattcctggagcggtgtttgtagtgaaaagtgaaagcatgacagcaaatgctcattgccaaattgtaaagagccgggtggtcttcatcagaatatctgcatcttctcgagacaccaagtccgtgcgagagatcaggatgacaccattccggattcacatctgctgtggaggctggtggcgtcaactaacttaccagcctgctgtttcagcaccctgcttcagtcgaacgggagtaaatcttgctgctgctttcgctgtgaagcctgctgcggtgctcattaaggcactgatatattttttgcattcaaaactaactagtcatcagcaaggaaacggtgggctttgctgtgctctgtcgagtattctttgaaaattctttgtacattgggaggtataagggcatgcagggctcgagttattggtttgacgggagcaatgagctgagttaatgatgtaaccgagccgtctttgtaaattgttccatgctcttcctcaaatacaatggatagactttcattttgaaaaaaaaaaaaaaaaaaaaaa

SEQ ID NO: 83 - DNA, 2156 bp, Saccharomyces cerevisiae
  CDS (569)..(1042)
cccgggaattttagattcaggtaggaaattgattacataaatactgttaccctgaatcatattcgacgatgtcgtctcacacggaaatataattcatttcttggttttccaaaaaaattttcattttttttcacttttttgtttcgtcctcctttttttttttttttattttttttcctgtgttcaccttttttttttttttttcagtttacaactttctgcattcttttctgtgttttttttttttcgtttttccattgttcgttcgttgcctgtttttttgccctattgttctcgagcctaaaaattttttcctttcctgctttcctttcttcgttcaaagtttcctattccattgttctcttcggtaaactcattgttgtcggaactcagatatattcaggtcaatttactgtacttcaattgacttttttcttgaaatttcaacttgccttttcaacttgttcttcttttttaatcttattctacactttagttcccttaccttgttcctaattattgtctagcaaaaagaaaacatacacctatttcattcacacactaaaacatgtctgacgaagaacacacctttgaaaatgctgacgctggtgcctccgccacctacccaatgcaatgttctgccttgagaaagaatggtttcgttgtcatcaaaggtagaccatgtaagattgtcgacatgtccacttccaagaccggtaagcacggtcacgccaaggtccatttggttacccttgatatcttcactggtaagaagttggaagatttgtctccatccactcacaacttggaagttccatttgtcaagagaagcgaataccaattgttggatattgatgatggctacttgtccttgatgaccatggacggtgaaaccaaagacgatgtcaaggcaccagaaggtgaattgggtgacagcatgcaagctgctttcgatgaaggtaaggatttgatggtcactatcatttctgccatgggtgaagaagctgccatctccttcaaggaagctccaagatctgattagatattttagatttctatagcttacaaaatacgcgatgtttttttgatctagaaatcttatttatacattttatataatattataataatcataatcataattattcatcctaactaacttcgttctgtttcagctacgaagttgccttcattatcggtacgttcgtgttaattggtgtttgataccatagtcacttatgacgacttacagaacttttttttttgacggatattttcccctcaatatgccgaggatgataactttataaattgccttctttcggttccttttttctttttaatttagctgacgggaacatgtgtatataccccagaagaatttaaacagaaatttttttgagctattttacgaaaatattaaaaactagggctacagatatcagagaaaaaattacttatatgatgacaataacttaatatcacagtcactatcgttctcgcctttatatgcgcaatgacagcattcgacttttccttagaagggatccgatcaacgaaacttcaaaaagagtagaagtcgaaatattttttgcacgacgagggtgacaaaccgtgctatgtccacaaatgaggccctgctttcccaagataaattgcgtaaacatataattgttacaaggatccgatcaacgaaacttcaaaaagagtagaagtcgaaatattttttgcacgacgagggtgacaaaccgtgctatgtccacaaatgaggccctgctttcccaagataaattgcgtaaacatataattgttacaaatccaaggctctgtgatttcttcaccaagtgtagttgtgatgtatagtgtgtaggataggtaatgaccggtaaatcaagctggtaaaaagtcctaataacaagcccgaatctggaataatggtaatattcccatgccaggtggacagtgttgtccttacacaaactcaagagattaaaggcaacttggccgagtggttaaggcgaaagattagaaatcttttgggctttgcccgcgcaggttcgagtcctgcagttgtcgttattttttatttccctttcttttcgtacatacacaatgcacagtcttcaaagtaaaataccaacgtatgtatcaagatc

SEQ ID NO: 84 - DNA, 1764 bp, Saccharomyces cerevisiae
  CDS (173)..(1336)
ggaagaactgaaaaaaaggtgggaaaaaaaaataaaaagtaaagtgaaaaattaaatgtaatgtatatttccattttgacgcaaagtacttccctctatcagttttgtatctaactgaagagtaaagtcgtgttttgcttagttaacttatatacaagtcaaagcaaaaaagatgtccgatatcaacgaaaaactcccagagttactacaagatgctgtcttgaaagcatctgttcctattccagatgacttcgttaaggttcaaggtattgattactcaaagcctgaagccactaacatgagagcaactgatttaattgaagctatgaagaccatgggtttccaagctagttctgttggcactgcctgtgagattattgatagtatgagatcatggagaggtaagcatattgacgaattggatgaccatgaaaagaaaggttgcttcgatgaggaagggtaccaaaagactactatcttcatgggttatacttctaacttgatcagttccggtgtacgtgaaactttacgttatttggtgcaacacaaaatggttgatgctgtcgttacttctgctggtggtgtggaagaagatttgatcaaatgtcttgctccaacttacttgggtgaatttgctttgaaaggtaaatctttgcgtgaccaaggtatgaatcgtattggtaacttgcttgttccaaatgataactactgtaagtttgaagaatggattgtcccaattttggataagatgttggaagaacaagatgaatacgtaaagaagcatggtgctgactgtttagaggctaaccaagacgtggattcaccaatctggaccccatctaagatgatagatcgttttggtaaggaaatcaacgacgaatcctccgtattgtactgggcccacaagaataaaattccaatcttttgtccatctttgactgatggttcaatcggtgacatgttgtttttccatacttttaaagcatctccaaaacaactaagagttgacattgtaggagatatccgcaaaatcaattcaatgtccatggccgcttacagagccggtatgatcatcttgggtggtggtttgatcaagcaccacattgccaatgcttgtttgatgagaaatggtgctgattatgccgtttacattaacactggtcaagaatacgatggttccgatgcaggtgcaagacctgacgaagctgtgtcttggggtaagatcaaggctgaagccaaatccgtcaaactttttgctgatgtcaccactgttcttccattgattgttgctgctacctttgccagtggtaaaccaatcaaaaaagttaagaattgatgagagaattttgagatgaaaaaaaaaaatgaatctgtactatttctttttttagtgccaaaattttgttttaatatagagataaataaaaaatgaacatattactataatatcaacaaaatatgatgtaatgtctgcaataaagatgagtcaattgcatttctataccgtacctaaaccgtgtgtacatagccatgaaattatgtaagtttatacacataaattgcgtcgagtctgctgtgtaatttataaatgtgtcacagcagcttttgtatttctattagttgccgttacctctcattttttcggcggtaagaatgtcactgccctatggattccattacatttttctcaatcagttcacctacggtttgaataaaccatactagcttcgtaagcacttactatacgttgttgagtaatgccta

SEQ ID NO: 85 - DNA, 2307 bp, Saccharomyces cerevisiae
  CDS (987)..(1880)
gaattcgtatctcattctccagtgaagtatcacaaattttaccgtggaaattcgttcctcaacaacgtgaggtttacgttctgcctggtgaaacagccctcgctttttataaagccaagaattacagcgataaagatattattggtatggctacttatagcatagcgcctggtgaagcagctcaatactttaataaaatccaatgtttttgctttgaagaacaaaagctagctgccggtgaagaaatagatatgcctgtcttcttttttatcgatccagattttgctagcgatccagcgatgcgaaatatcgatgatattattttacattacacattcttcagagctcattatggtgatggtacagctgtaagtgactctaaaaaggagcctgagatgaatgcagatgaaaaagcagcgtcattggctaatgctgctattttatccccagaagttatagacacaaggaaagacaactcaaattaattgtaaatacaaagtcattcaatgtacataaatactgttatgcttttgaattaagtaaaacaccatgacttcatattgagatgttttaagcatataatcacggcaccgaacttcttgtaatcatcaaatctttgttttctagccgtcatagaaatgaagaaatgaagattcttgttcatgtgatacagcttttctagacagctaacttgtacatccagacatcctaaaacacccataaagcaaaaaaaattattgaaatattctcttttttttcttttttttttttctggtggctttcaatgcggaatcgctaacatccgaaaatttcagaggcttcacttagcgtcgcagatcccgtagtcgccagatgctttgaaaaaaaaaaaaataaatagaaaagtttgtagacatatccgatgtagtatatttcagaggccaacctttacttttgttttctcctacacttcaaaataaaagacaccgtcacaaatctcagcaacaatggctttccaaaaagacgctaagtcctctgcttactcctctcgtttccaaactcctttcagaagaagaagagaaggtaagactgattactaccaaagaaagagattggtcacccaacacaaggccaagtacaacactccaaagtacagattggttgttagattcactaacaaggatatcatctgtcaaatcatctcttctaccatcactggtgatgtcgtcttagctgctgcctactcccacgaattgccaagatacggtattacccacggtttgaccaactgggctgctgcttacgctactggtttgttgatcgccagaagaaccttgcaaaggttgggtttggacgaaacttacaagggtgttgaagaagttgaaggtgaatacgaattgaccgaagctgttgaagatggtccacgtccattcaaggtcttcttggatattggtttgcaaagaaccaccactggtgccagagttttcggtgctctaaagggtgcttctgacggtggtttgtacgttcctcactccgaaaacagattcccaggttgggacttcgaaaccgaagaaattgacccagaattattgagatcttacatctttggtggccacgtttcccaatacatggaagaattagctgacgatgatgaagaaagattctctgaattattcaagggttacctagctgacgacattgatgctgactctttggaagacatctacacttctgctcacgaagctatcagagctgacccagctttcaagccaactgaaaagaaattcaccaaggaacaatacgctgctgaatccaagaagtacagacaaaccaaattgtccaaggaagaaagagctgctcgtgttgctgccaagatcgctgctttggctggtcaacaataaattatggatatataacgtcattttgagatattttaaataaagctatcttcacataacctttgtattcatttttagttaactcatttacatcatccacttactacatttgtattttttttacgatttgcgtaccgcctcattactaccctttttttgcactgcagtaatagtacactcaaatcatgatgaaaagagaaaagaaaaaaatgccacaaaaagtagttgattttataaaagttatcatccaattttaggtaattttattctctttatgtaacgaacatatgaagatttcttctctagaatggcattctaactaagtccgtgccataaaatcatcactaacaaatataagatcacgctatactatcaatgaagaaacaaatattaatagttgctgcacaaagtattttatgtctactgtttt

SEQ ID NO: 86 - DNA, 2995 bp, Saccharomyces cerevisiae
  CDS (576)..(1976)
gaattcgtccccgaacgcaactgcgaaattgaagggtaccgttgcttattttgtaattacataactgagacagtagagaattgatacatggataactgaatctctttcaactaataagagacattatcacgaaacaattgtacatttctctccttgtctgtgctaaataaactacaaataaaaattcattttctttcattttcattcgacacgccgcggcatcttcgttttcttcaccgattaattttaatctgcgccgtgcagatattttcgcccatttcgaagtgaaatcattctaataacttctcctgcgcaatagattggtcatcctgatttttattctgaaatcgaaaatgaaaagcatttattgcactgaaatagcggaacctgcttctaataagcttaaaattcaatcataatagtgtagttaatagaaaggacagaagaacttttcgttccttggtttatcatccaggtttcagcacggcttttgtttcaagtttaagtaggtaagattttttgattgttctacaactttttcatagtaatcaaaacctttgaatttcaaacttactatgtctagtactcaagtaggaaatgctctatctagttccactactactttagtggacttgtctaattctacggttacccaaaagaagcaatattataaagatggcgagacgctgcacaatcttttgcttgaactaaagaataaccaagatttggaacttttaccgcatgaacaagcgcatcctaaaatatttcaagcgctcaaggctcgtattggtagaattaataatgaaacgtgcgaccccggtgaggagaactcgtttttcatatgcgatttgggagaagtcaagagattattcaacaactgggtgaaggagcttcctagaattaagccattttatgccgtcaaatgtaatcctgataccaaggttttgtcattattagcagagttgggcgttaatttcgattgcgcttccaaagtggaaattgacagagtattatcgatgaacatctcgccggatagaattgtttacgctaatccttgtaaagtagcatctttcattagatatgcagcttcaaaaaatgtaatgaagtctacttttgacaatgtagaagaattgcataaaatcaaaaagtttcatcctgagtctcagttgttattaagaatcgctaccgatgactctaccgctcaatgtcgactttccaccaaatatggctgtgaaatggaaaacgtagacgttttattaaaggctataaaggaactaggtttaaacctggctggtgtttctttccacgtcggttcaggcgcttctgattttacaagcttatacaaagccgttagagatgcaagaacggtatttgacaaagctgctaacgaatacgggttgccccctttgaagattttggatgtaggtggtggatttcaatttgaatccttcaaagaatcaactgctgttttgcgtctagcgctagaggaatttttccctgtaggttgtggtgttgatataattgcagagcctggcagatactttgtagctacagcgttcactttggcatctcatgtgattgcgaagagaaaactgtctgagaatgaagcaatgatttacactaacgatggtgtatacgggaacatgaattgtattttattcgatcatcaagagccccatccaagaaccctttatcataatttggaatttcattacgacgattttgaatccactactgcggtcctcgactctatcaacaaaacaagatctgagtatccatataaagtttccatctggggacccacatgtgatggtttggattgtattgccaaagagtattacatgaagcatgatgttatagtcggtgattggttttattttcctgccctgggtgcctacacatcatcggcggctactcaattcaacggctttgagcagactgcggatatagtatacatagactctgaactcgattgaaggatatatttaaccacgactttcgcaagagagacggagggggtgggaaaaggctgaatgcaaccattgtcactaagaatttgagtgttcatgaacgagttatacacgctatttaagagtcagagaatgatgattcaagaaaattctggcatttttcctgtccaccactgtacgccattgtacacaaaagtatttttttatattttttttacaattttttataatttttttttatgtttagtgtatatttgctagaaagaaacaagatcttttttggtagtgtaaatgcttaaactttgtctctttttcctttttactttggaaaaatgccgacgcaagaacatagacatctgcgaaaaccaaaaataaagtaccaattgtacatacaaaaacagagaaaaagttcatgaacagaacgttactacggtatagcaagatctttgaatacatccattacttcggattgttcaccatacttcaacacaggccaagatagaccatagctacagtgatagacgaatatttatttcaaaagaagcatcaaccataaaataaaaagaaaaatgatgaaaaaaaaaccaaagtgccaaattgcaaggaccaaaccatcggtcgaaaacgtcataccatataaccaattcaagaagacgcagccgcgattcaacggcaacttttctgcactgaataatgaagaatacataatactctttggcggaggtcgggacctgatactaggctccctgacaccttgttcgagctctcatttgtccaatcaagccaacccacaagacaccagtgagtatggcacagacctgtttatactcaacagctgcattatcatttggttcaatggcttgggatatgggctggaaattccctacagcagcgttttgtaccatgcatcaagacggctaccagatggtagggaagggcttcaattagaaattttgctgactttggaaagagacgaagtgttggacatgctctaccaaagcctcgcgccacaggcctgcgaattc

SEQ ID NO: 87 - DNA, 15323 bp, Oryza sativa
  CDS (501)..(750),(1257)..(1417),(1735)..(1800),(3104)..(3218),(3318)..(3427),(3525)..(3620),(7587)..(7744),(7828)..(7915),(8565)..(8669),(8774)..(8878),(9421)..(9450),(9544)..(9656),(9732)..(9812770)..(12898),(12975)..(13073),(13221)..(13259),(14674)..(14823)
tgttgcatatgtttgtgttagtgctcatttaagcgtgttatgaactagaaatgcttagtcaattccaacaaaaagttcttcttagatgattattctgccattgtgctgctttagctgtcactgagtttggcatttccactcttgcagataactctacccaggctgagttgtggctggtattggcgatataagcttgttagctgttttctcttgtgtctttggtcttcatctttgattacgcgtcattgaaaagactgtacatgagaaaactcttttgttgaaacatttctcttgtaatatgaatgtattgagtttgtgactatccttctcctgtgctagaatcatatatttcagcttcaaagctcttgtggtacttttcaagtttcctgttgaaccgaatacctagtgcattaactctaagcttgtgacaaacattcatgcaaattcgtggatattaacattggatacttggtctactggaaaattggagctccttattcatgtcatcaatggagagcctagcacagttagagctgttatgtgaaaagctttacaattctagagactccgctgagcgagcacatgcagaaagcaccctcaagtgcttctcggagaacagtgactacatttcacagtgccaatatatattggacaatgcctcaacaccatatgccctgatgctggccagttcaagcttgttgaaccaagtcaacgaccgcagtctttcattgcaattgcgtcttgatatctgtaatgttccttaccaaaaatttatcatgaaatcagttgttcacctgtttttgcttttctattgcatctgcatggcatgttttcatttacgtctctaccaatttattcagttatgattatttctgcattgcaagttaccacagaaagcagtaagcactcgtttgtactgctatttagtataagtggccatatttaaatctttgttgttccttccttgactcaacttatttctgttgcctttgatgtcttatgcttatttaatatggctcgagttgaacaaacaaatatttattctttgcattctatccttgaattcatttatgcctctgcagcatgttagaatggccaaatatttatttccatttacccactgttgttttatgcatcggtaatgtagataaattgcaaaaatacatgtctataaacaatgcttaaatctattttgtgtacttttgtgcccttgtctactgctaattttaaaccaatatattgtgatctgtttgaagtgaattatgtcataaactatcttgctatgaggggacctaaactgcagacgtttgtgattaaatccctaattcagcttgtctgtcgaattacaaaatttggatggttcgatgatgataaattcagagatattgtcaaggaggcagctgatttcttatctcttgtaagtttgttgtctgttttgttggcatttagttgagagctttttaaccgttgataacatatttaaggactatgtaccttcgatttgagtggagctatacaccttggtacataaatccttggcaatttctatgaccaatgcccgttctttagaactaagtaatatgaaaaaggataaccggcctaccagataaatctacataagaacctgatttctattaaagaatccatatgaggaacagttataggttttattccatgctctattgcgagttaattgatgcatactaaagttgctgcttatgcttttcatttcaggcatcccaggatcattatttcataggattgaagatactatatcatcttgtaggagaaatgaaccaggtgccacctagaaacttctctattattataattgttcaataactattgattctaatcaataagataagggtacccataagataatgcaatttggcaatacgtagattaatttaaaagttgaaaaaaaaatatttcaacagtattttttttgtgtttagaactgcacaacgtgcatggtgttgttggcacttataaaacatcggatgaaacacagaaggtcaaacgtacatgaaacactacatatgcactaacttgtgcatgaatcaattaatatcataagtaaaagttgttctttattttcctttgcgacacttaacaaagagttataaacatgcagatagacatatataggcatagtattattgaaaaaatattaatggttaatccaaccaatgttaacaagacaaagttaaacattgacactgatggttactgtattaatttccatttattttaaagagtattggcggcaatatgatactccttccttccctaaatgtttgacgccgttgacttttttagacatgtttgaccgttcgtcttatttaaaaacttttgtgaaatgtgtaaaactatatgtatacataaaagtatatttaacaataaatcaaatgataggaaaagaattaatagttacttaaattttttgaataagacgaacggtcaaacatttttaaaaaagtcaacggcgtcaaatattttgagatggagggagtatgtggcaccttactaaattgtgttggggtagtgttggtagcattcctttttacctgcttggagctgtgatgcacatttcagcctttttactgtcccacctttctgttagcctgtcacttctttttatgccttccttctttgtcttaactttttctggtatagtttcttgaatatgattgtgtgtcactgtatttcttgtaatgttgagtttcattttatttaacatgaaataacacagattgcttgcttagtacaagaaagggttctagttctacaaatatcttctatgaactgtttctctttttttccggtaacaattctttcaatgaatagttgatttggaccattaagctttctcagtatgtacttggcttcatactttttgcatgctgtcttctgcttatgaattatatagtgttcgttaatatcttcaattctgattgggttatgtacttatgttgttgcttatatcttttcaatatagtttatactgctgtgcccatttttatccactcttgttcaatttcctttgtcaggtggactgtaatgtgtttagctgactttttgtgtctgtgtatgcatgcaggcaaacgctatgcctttgacacttcacagaaaaattgcttgttcgttcaaggaccagtttcttctacagatcttccaaatttctttaacctcattacaccaactgaagagtgaaggtaaagttcaaggaccacattttgtaaaaagtagagtgtatcggaatgcccacactttctcacttccatcttctgatacaatctgtaattaaactgcagtacctgatgactttaggcgtgatcccctctcgcttgcattaaggtgcttgtcatttgactttgttggttgtcctgtggatgaaagctctgaggaatttggtacagtgcaggtatgttagtttgcacaattgttatcttctctgtaaaaccattgacctatcccagttggtctatttcttataatttgtgtaatttttattgatgcagcttcctgcatcttggaggcctctccttcaagatccttctactgttcagatcttcttcgattactataaagtcaacgatacatgtgtttcaaaagaggtatacattgattgggtgatttgaataatatagatgatataatctctgattatttttaccgagtgctttgtccattactccataaacacaaaagaggtatattttgcttcatagttcctcatgtttagaatgtacactttgatcgcatgatttttcattaatacattttacaaacttattgctagttagctatcactacagttctgcaatattttgattgacttccattcagcagcaatatttttccaatgttgtcttttaaaagcatgacttcctcacctctgtgaagcagcaatattctcctaatgtatggatctctaagaggcatgctttattcctttcaagaatctctaagaagaaatattttccttgtgaatttatcttacaaacagctgtttcgtttttctttctatatgagtaatgtgccatgttcagtggatttgctctttccttgactcttccccgcctccctctcctatgcacttctttatgtcatttctgcaggctttggaatgtcttgtgagacttgcttctgtcaggcgcagtatttttgttgaggacccttcaaggacccagtttctttctcatctgatgtcaggcacaaaggagatactccaaactggccaaggtataacgctttgtcctttttttgccaagttctgttctattgtagtactcctgttacaaatttcagttacttggaccagcggtttcaattgcaatcctcttacatggagtgaaaagcctcttttatgtaaagtgaagaagcatttaaaacatgagttgattgactcatgcctagtcacgctatgtggtgcactgtagaaaccagacttgctttttataagtaaaagcacacattggttcattataaatgcaatagtaatctttaaacttaggtacttgtctgtcaaattagctccatgcaggaacaaaaataaatgctccatatctttacgtaatttattctgatgtgtgatctgctcatctgcaggtcttgctgatcatggaaattaccacgagttctgccgtcttcttggacggttcaaagtgaatttccaggttggaatcctgttacttaaaatgaaggatgaagctaacttttcttgtttgttttgtgtcaaggatttgctcttcgttctctctctttgcattcttttacagaattattgacttgctagtttttggtacgtaacaactgatgaattagttggcaacagtagtgatgcattaattctggttggtatcctgactgaaatgaattgcgatggtggggattttgtgggattccaaacacgccttactgatgttattttaccctgatttgtacttttgtactattgctttgaaggaacagtaataagtaaatccaatggtttgtagcttctagtcttttggctttactagcagcactaactagtcatactgatatgcagttcaaggttttaaatagtggattgcatttttatagtgcattggttttgatgtagagcatatcgtaatgatgcagtgcatgttgtagtgaacagttgatggaatagttaatttgtatcataattataattctacgaagtgaactattgtgtttatgatgtttttatgtatttttggtaatgtttgcaacttgcaagtgctatttttgttggcatcttcttttaattttttgccttacagacatttggtaccaatttattagctttcaaagtttcaataaacaacggagcatttaatacctgtgtaatagtgttgtcaactgaagatggccattgttccaaactttcttttaccatttttctatatgcattccttgtcccaattgcctattactaacttactgtttgttaagttctaaataaaaagcatggttcaatattttcttaccacattcaaaatttgccataatgaccattccttcttatttagaactttgataataacgtagttatgtaaattagtctatgttgatcatgaaaataaaattgaactgtattatgtttgttttctgttggcatatcttcattgtgacattcggaatactcccggcattttgactaccaaatgatttggttggttgattgttacctgtgtattagatagtgttggctgcactcatttatgatcctttatcaagttctctgttattatcatagtaatattcaagctatgaatggacctctttgtgatcaagtgtggattcttgcattgttgtactttgcagttgtcagagcttctgagtattgagttttatggtgaatggattggtttagtagcagaattcacaactaaatccttgttgtcatggcaggtctgtttcccttttttttttttgactaattctcttagcactggattattcaataattaatttccaatagttctaactattgaatatttgtagtgggccagcaatagtgtctactatcttttgagcctttggtcaaggctggtgacatctgttccttacttgaaaagtgacacaccaagtatgcttgatgagactgttcccaaaatcacggagggttttatcacctctagaattaattctgttcaggtactgatttctaatgagatgatggaactgctttctatctcagattctcagttgaagagtaacgtttgttatattctgttgtttctatccatctcaggccagctttgcaaacgactcatccgatgatactttggataatgtggatgttcttcaggagcagttggagtctcttccttacctttgtagattccaggtcgccatttcctgtcaagttctggtttccaatttaagagacaattttctgttaaacttttgattggatccatctttgtaatcatgtccacctgtagataagataccttgcttaatcaattgaatgttttcttttatggagattaaccctgttccagcttttcacataacaggattcatagttttatgtaattgatttttttattgaacatatacattggttttacttttatctacttgcagtttactgcatgcacttagtaatttcttgtatatggcactagaatttctttctttaagttatggagaactaatagaatgatacaacaacagtagatgcatcaaatttaagttgcattatgctattcattttttatcgtatttaattatacgattctaaaacaagaataaccagagtaattttttggccaacttaagtgctttgttgagttgttcaacttcatattctggacgggtgcagaaaatatagtaaataagataaaaaatttgacaaatttagaaatgctattggatggatcaaaaggaaagataccagtttctctctgcatttttcttttttgggcggttgggggggggggggtcaatggctgtgatcagatgctcatgttccagtataacagtagctatttgttttgttatggcaaactggctgattgaaattttctaagcacttcatgtggtcgtcagcccttcccgattgacatggtcaagaataaaggcaactgtggatagacatgcaacttagcagttttgagccttcgcaagtgttgtgtacacatcctatgtttattatgtatgttagcttgccaacatgtgagtttagctatctacattgtgcctctcaaacagatgaagatctcttattaccatttctgctgttttcagctaatttattacgccacttcattatatatatctgttatttttgtccggatggaatttttatataattattttgagtcactactaacctccttgccagttaccaatagtacgaagaagctagatgaaatgcccttattgttcttaggcctttttttttttgatagggagttgcattatatgacatggccataacatgattttcttttgctgatttgcagtaccaaaacagtagcatttacatcataaatattatggagcctcttctacaagcttatacggtatgttagtgttatttcacagtcctcttttttgggcagaaagaatgccttttcaaagccaaatactttttacaggaaaggtcaagattaccagctcctggagatgcgaatgagctctctgtcattgaaggacagctcacatggctagtccacataattgaagccattctcaagattaggcagaccattggttgtaggtgagaaattaacattccttgcttccttatattctgtttgatttcctttttttttcacctacaatgctcattttttcatgcagccaagaatcacaggagttaattgatgcagaacttgcagcccgtgtgttacagttgataaacgttactgacacgggggtgcacgcacaggttagatgaaaatgatttggtcatctaacatcaatgctgagtgctgagctagtgtacttgtagcaacaacaattttcctttctagtattgtctgcaaattatagaatataattgcatatgtaggtaggactgattttgttttttgacaaacatagatattttctagtactgtaatgcaaataacttacaactttatttttatcgccaatactgtaacatatataaccaattactcgtttctctatttgtcgtgaagcttggagtcacagcaacgcatgtggttgttgatggtgttttggtgtttcttacagttatcatgagaatgctaccaatagaagctgtgaatttgcacttaaaaataggctgaaattgaatttatttaacgaaaatatctaaacaatgtccccctatgaacttaacctttggtaaccagcccactttaagagagttatatttcatattgtattatgtgcagcatgtaaaccacatactgtccccataaaccaaatctgtttctgtattgcgacactacgtatcacaggatgctctccaatttgttctttactttcattaacctgttttagctgctcttataaccattcacagcttcacaaatttgtgaatgatgacttgggtgcattctttgcagagatatcgagtattaagtaagcaaagacttggtcgtgctattcttatctttgtgcaaaatttcagaaggtcatatgtaggagatcaagccatgcattcttcaaaggttagaagaaaccgaataataggacataactattataatttttctttttatcttgatgtacctttttatgtaaatccccatcaagttttacttctttgctgcagcagttgtatgcaagattatctgagcttcttggattgaatgaccatttagttttactcaatgccattgttgggaaaatagctactaatctaaagtgctatgctgaggtacctattgtttagacatttactgattttaggcatactttgatctatatgctgtggctgatcctttgtgtggttacagtgcgaggatgttattgatcatactctgtccctcttccttgaacttgcatctgggtaaagttgtagctatatgtattcactttacatgtctcatgcttattatggtaacaattcttcatatgtattttcgtagcagctatatgactggaaaactgcttctcaagctggagagtacaaaatttataattgcaaatcattctgtacagtcttctcactagcttctgtttcatgttatccctgtgccattcctggtcttagaagtgattctattttcattattaatcttttcagagggattcttttccatttcttgaagaatacagatgtgcccgcagtagaacaacattctactacatccttggctgcttggttttcatggaagacaccccagtaaaattcaggagtttcatggagcctctcctacaagtgcattgctacttatattcataatctctccgccccagaatgtagctatatctggacctgtacagatcgtaggtagaaatagctacattttggggtgtaggaagtactagttaagttttttctccattcttatatggttttcttcttcgtattctccataggttgcagttaatttggaggcaaccgctgatgctgctttctggactgatgttgtgaagtacgcatttattggtttgatgagagacttacgaggcattgctatggccacaaacaggtgcacaatttgattatatgtggtatatatgtgcatcaactcactaactactttgttgatctgatccagccgcaggacctatggcctcctatttgactggctatatccatctcgcatgccacttttactgaaagccatctcactctgtgctgatgagccggaggtaactaccaaatcgcaatgctttccttgcgtagctgttctttttgaaaaagtttgaactgtttttagaaaatatctagagccttatgcttctaaatcttttgctcagctactgcaaaatcaccactttgtgttcatgcaggtcaccacacccctactcaagtttatgtgcgagtttgttttgaacaaagctcagagattgacatttgattcatcatcaccaaatgggatccttttattccaggaggttagcaagctgattgtggcttatggatcacgtattctgttgcttccaaacggcactgatatttatggaagtaaatacaaaggcatatggatatcacttgctgttctttcaagaggtgagttcagaaaatatgttttgaaaacacctgtatgctctgcaattttattacagtttcagtaaagtctacctgctgttattcactgttttctaatgcttgatttttttagtggatttcatcctttccaattttatgtgcgactctcattgcacaatttttttgtttgaaaaagtgtgctttaggttacacttttgctgtgaaatgttatttgaattccaacatgtctctacgaaatttcaagaccaaaaccttgtttttgcaccccattgagatcattgttttccaacagacaatattaacttatccccatgggccatattacctggactgtgaaagcttgttcatttctgttaatcatttaactccttactgatttgtgatatttgagttgaattgtagcctcataggccctggcagatgataaatatttcaattgcataagatttgcagtagttgagaatgggtttatgatgattttggctaaactgaaatttaactgcaactatggttaaattctgttgcaaatatggcagactttctataccttttcagtttcatgtgtggtatgatctatggatctccttattcaagaggatactgatttacttgaatttggtatgagatgttacttggagttttcggttagggtgacagctgagttccaccatctctgattcaaactttttgttgtgcttttaatgttataagaataaaattggctgagttccactcaactccgagcccaattatttgttcttaaactgtatcttctgggaaccttatctcccattgcagactaaagatttgtattttttttcttttgctgttattctgactggaaccattgcagctttatgtggaaactatgtcaattttggtgtatttgagctgtatggtgacagagcacttgctgatgcccttgatatatctttaaagatgagcctctcagttccattgtctgacatattggcattcaaaaaggtattccttgcaactttagtgatttactattgttttgctgtgtagtgctattgcttttattaatatggttattaagatctcaaatatattcattctaagttttatagcattgaagatgtaaagttctcattatatcgcaatgaaagtgaattgaatgttatgtatatcaattaagcagaggtaattacttgtgcctcaggaactggactgagtgattttagtgccaatcttctaatctaactgagaaccctgcatttacgcacttggtccagttagacaacgctgttatgacagaatatacaaattgatcagatcctagtatcttagcctgtctagaaagatttgtatattctgtcataacagcgctgtcatttttttatttgaaaatatacacagtaaaattaccaggagaaaacatgaaatgagtaccgccaacagtgggctccagagttctatcaggaaactttttctttggaacatgggatgctgctgttattttttatttttatgccagacattttcaaacatttttttaagagcattctccaacccctagaactgtactccagttgtgtttgaactttgcatattttttttcaacattttgtttgtagtctccttggcattttaccagcaggtaccctgcatgcgagcttagtttatttatttaggtgatctcctggcaatttttgcccactggtaacatgcgtacaggtttagtgctatgttttccaacaattgtgcttttactggcttgatcatagacaaataaacagcctagacaccattccaggtcttgcattgtcccacattgatttatggttaaccagatgattgagatattcttgtttcatccgtggaagcattcatactaggctctttctttatttcagctgtcaaaagcattctatggatatattgaagttctgttcagcagccatatcacttttgttctcaatttggatacaaacaccttcgtgcatattgtcagcactcttgaatctggcttaaaaggtctagatacagggatatcaacacaggtatacgacatgatgctttttactgcttgtaaaatgttccccgcttcttgttacaacagcatcggtgaatcactgcttaaactgtgtcctatcggggaagacatacttccaatctgtggttgctggtagataataattgatgccatcataatactctattctcttttatgtggtttcccttttagtttcttctcttggatctggatgtcatgtgcaacctggttagggcccacatagaagcagcagtcaacctctctaggcctgcagtactgtgcacatgaatagtaatgggaacaacatctgcctatggttactgtttaatcatttccatgttcttcgatacggggtatatcgtaaaggtttgggttgtagaggtttattaaggaagcaatacacacaagcttttagtctcttttttatctccttcccttatgcagctacctcagcactgcttggttcattaagcctaagggcccttaactatgttcatcacattggaatccatcattgttctttagtgctttctgtttggactaatctgtaaattgttgcttccttttggcagtgtgcctctgccattgatagcttggcggccttttatttcaacaatatcacagctgctgatggccctccttcaccagctgcactaaatcttgctcggcatattggagagttccccactttatttcctcaggtttgtgttaataatcttctctaccatatgcagaaaggtctggatgtaattacattttgttttttttctgtgacagatactgaagacgctttttgagatcatcatctttgaggatgcgggtaatcaatggagtcttagtaggccaatactgagtctgataatgatcagtgaacaggtgcttgtctttttaaaacttttaaatcatgttccttagcatttcttttgcactcttttttccagtttgtattgtctttgttttttttctttttttttttgcgagggtctttagatcttttctaatcagttgtttttctttgtgcagatgtttagtaatttgagagcacagatattagcatcacaggtcagtgaactctctggtctgatattccactatgcagtcctgtctttctagttttatttttgggttaattggatccatgccactgcaaatatgccaatttgaaaaaatgtcactactattcagcattcggctatgtgccactgaaaattggagaaactggaaccgttcacattttccgtcaaaaatccctgttagcccccaactgcacgtgggccccatctccctcccctctcttctctttccccttctctctccaccaccgtagatgcggtaggtgttgtcgccatcgtctcggagccggaagatttgcgattcaccctcaccgatctcgcgacgatgggtgatgtggccgcaccagctgcggcggcgcgggcggcgaggccgacgagcccgttgcgcccgcccaaggcgatccgcagcaccaagccaaggggctcgacgaggagaccgtcatggcaccattcgtcaagcaccttgtctcggagccggcctgctgggatgcgcctgcgtcgtcgtcgtcgttgtcgagcgcctcgtctcggagccggcgagccagactgcgcctgcatcgtcgtcgtctgctcccccggcaaggtccccggccaccgcccccgtgccggtcgtcaccccgcccaccgccgcatcgctgtggccaaccctcgctgccaccgccaccgacctcctcccggagcgctcgctttcatctccttcccccgtgccgctcgtccctccgcacttcaccatcggctccccggctgccgattcccctcagccgtcgccctcctgggctcgccggcgtccatggcggagaagctccccggctgctaattccctcgacgacggcggtgagggtgctgcgtccgccggcaaggacgacgaggaacggacgggtcgcggcggctgctggtggagcagcgagagatggagggggggggggatcactggctagctgcagtggcaaggaccagcgagttcgaggtggagtgctcgccggtgtccatggtggagaagtgaagaaaggaagagggagagagatgacggaggttgacagaaaactggatggaagtggcatggttccaatttccccaaattctagtggcacgtagccgatatgctcaatagtagtggcattttttcgaattggcatatttgcagtggcatggatccaattaacccttttttttcctctgcttgaagctttctagtgtcaagttatcaacaatgtttccagtcatcagcgtgcaggtgttaggagacaagtttcttttcagtaaaaatattaaattctactagtacatcttttgattagaactgtatgtccagcttgtgatgtacctaagttttgttaacatatgtctgccaataacagcattagtaatcattattgaagaactaatgtacgtcttgtttgcagcctgtagaccagcaacaacgcctttcgcaatgcttcgagaagctgatgtctgatgttgctaggaacttggaaccaaagaacagagataaattcactaaaaatcttacaacattcaggcatgatttccgtgtgaagaacattcaggcatgacagctgttcaggaccagctaccagctttaaggtggtgcactcatgtgctgtaaatactttagcttagcttcgttttaggaaccaccattcccgtggggggaaagttatggtttaactcagtttggtttggattggctgaaagatgaagggttctcctgctgcacgtggtggcaaaatgcagttgttgatctcttaccttgtcgtgtactagactggcgagtgcaggagattcttcttcttcttcttcttcttcttcttcttcttcttcttcttcttcttcttcttcttcttcttcttcttcttcttcttcttcttcttcttctctttttataccttagtgttaattccatctctttttgcttgtacagcaatattcatgtgaaagcctgtgatcgctgtttccctaagttgttagggcgaaagcagccatcgctcaaaatataattcatttgttaacaggttagaagaatagaaaaaaagttgtaaatggttgtgcttcc

SEQ ID NO: 88 - DNA, 3501 bp, Saccharomyces cerevisiae
  CDS (415)..(1605)
ccagagatatgtagccttccatcagtagtaatatccaataaattgggcaccatggtttggcaatcaggctttttaccctcgccctcttttccttcgccttttacctcttctgcatccaatttcagcgtacgtacacaatgattgactttggaaattttcacttttttccactcgaagaaaaaaaattccaaacacggttctccggtatttaggcatcgaataaactttgctaatcgactaaaagcatctctgcatatctatacgtgtatatattgtattcgctacagctcgctccttgcatcaactctttttttcttttttttcttccaggttaatcaattactgtactgtagcttcttttttatattttttaggttttcatatagtgtcttacgcaaataggcggaccatagaatgactgtcaccataaaagaattgactaaccacaactacattgaccacgaactatcagccactttagactcaacggatgcgttcgagggtcccgagaagttgctggaaatctggttcttccctcacaagaagtccatcacgaccgaaaagacattaagaaatattggcatggatagatggatcgagattttgaaattagtgaaatgcgaagttctttccatgaagaagactaaagaactggatgcctttttgttgagtgagtcttccctcttcgtcttcgatcacaaattgacgatgaagacgtgcggtactacaaccacattgttctgtctcgaaaagcttttccagatcgttgagcaagagttatcgtgggctttccgcacaacacaagggggcaagtacaaaccatttaaagtgttttattctagacgatgtttccttttcccctgtaagcaagccgctatccatcaaaactgggctgacgaagtcgactatttgaacaaatttttcgacaatggtaaaagttattccgtgggaagaaatgacaagagcaaccactggaacctgtacgtcaccgagacggaccgctccacacctaagggaaaggagtacatcgaggatgacgacgaaactttcgaagtactgatgacggagctggacccagaatgcgctagtaagtttgtttgcgggcctgaggcatccacaaccgctctcgtggagccaaacgaagataagggccacaacctcggctaccaaatgactaaaaatacaaggcttgacgaaatatatgtcaactcggcccaagactccgatttatcatttcaccacgatgcatttgcgttcacgccatgtggatactcatccaatatgattctcgctgaaaaatactattacaccctgcacgtgactccggaaaagggttggtcttacgcctctttcgaaagtaacatacccgtatttgacatttcccaagggaagcaagacaacttggacgttcttctacatattctgaacgtttttcaaccaagagagttctcgatgaccttttttaccaaaaattatcagaaccaatccttccaaaaactactaagcatcaacgagtcactgcccgactacatcaagttagacaaaattgtttatgatctggacgactaccaccttttctatatgaaattgcagaagaaaatatgaaaagccgccatttgtgtctcctcatacttacatagaatagccctcttctattatccttcgcttgctttctagcactcataactaatgtagtttaacccgcttgtatatcttctacatcattaccccgcatgcttttttttttcctctagagaaaaccggcacagattggccggacccggaacaggaaaaatggccactgaaaattcctggccagaccacccctgagctaagggagtttagccgctcaagcttttatttcctctgatgtaatatatcacacacccagacacggttgccaaggcctcgacggaaggccgcttcaagggacggggcagtggctatcagaaataccttaatatcatcaatatttttcatcaatcgcaaggtgtcaaacatcaataaaggatgatgctcaaaggtttatgcccgatgttcttctaatcccctttctctcctaaaataatcctttttttactcttcttcttttcccctgtttccatttttgtcttttctcaccccttatgggacatcaataatgcaagtatgtttatacatttttatataaatgtatatataaatgccatttcttacacataacctccattctttggttaattctttcttcattcttttttttttcattctgaaaagccctccaagcaagcacgctaatttaatatcgatttaaacatgaaagtatcacaagttttcatttctgccatctctgtcttcggcctcgctactagcgtaaatgctcaaaacgcatccaacaccacgagtaacgctgctcctgctttgcacgctcaaaatggtcaactactaaacgccggagtcgtcggtgctgctgttggtggtgctttggcctttttgatttaggaaaaacgccgcttactgccacgatgatgataccctattgacgtttctgaaatgtataatttcttttctcatcttcccctttgatattccatctataggccccagagtagtaaatttggtgctttaattttttttctcttcttccagttcgtctctattttttcattccattatatttatttatcagttttactttctcaaatattcttatataacactatttcatctacgtaaccgaaaataagtagtttaataacgataataatcataattgtgataaaaatatttacatttttcttacttgtcgcccgcttcgtttttgtatagaacgtactgtattagttgtccgttcttttcacgtctgaagaggtcgatttcttgcaatttaacatcaacgtggtattttccattatatacaatcaaagaatcatcgtccagttcgatttcgccatgaaaccaaaggtgtaatgcatgtgagtccccctgcagtgggtattcgtacttgaacgacccgtataccctctccggcgatataatctcaaataaatcggctgtttccaaaccaatgcggttcagtaaatcgtcgatggttccccgtatacttattggccgatgcgttatcctccatttgcaaacaaagggtattctataccaagtgtgcgaactatcccttttatcgtctggctccattacaataccagttacacatggatcttgatcttcgcaccacatgctgaattcatttaacgtgggtgaattgccatctttatcaagcaatggtactccgtattgttccttgatcatgtcatgaccggataatatctctaaaacccttaatttagaaagcttctgtacttggtttacgtcaacctttttcaaatctctggtactcagtttacgtatcttggatgatggaaacaatggtaagaaactttgttcctttaaatatatcactctatagattagtgagtatcctaatatcacaccgaatataccaccaaatatggcggaccatatttg

SEQ ID NO: 89 - DNA, 1650 bp, Zea mays
  CDS (268)..(1365)
attcggctcgaggcattgaggacgttcgacctgccggaggcgcgaagaagttccagtctgctgcttactccaactgcgcaaagaagccatcctgatatcccttttggctttctcgttctagtagtttaggatttcttttctgacacttcgattcttaccaatccccctggcctgctgctttcctgacaatcgaccagttccccagtcttgctccctgcagtcctccctcctccatctccagcgttgtgttctgactcacctgcaccaatggctgttctttctgctgctggtgctcccccggcctcagctatcgggtttgagggctatgagaagcgccttgagatcacattctctgaggcacctgtctttgtggacccccatggcagcggtttgcgtgccctctccaggtcccagattgactctgttctggatcttgcacggaagattgtcatcaagacctgtggcactaccaagctcctgctcacaattccaaggatcctagagcttgctgaagagctgtctatgcctcttgctgctgtgaagtactcccgcgggacgttcatctttcctggcgcacagccagccccccaccggagcttctccgaggaagttgctgtacttaaccgatactttgggggcctgaagtctggtggcaatgcttatgtgattggagatgcagcaagaccaggacagaagtggcacatctactacgccactgagtacccagagcaaccaatggtcaaccttgagatgtgcatgactggtctggacacgaagaaagcttcagtcttcttcaagactaatgctgatggcaacacaacatgtgccaaggaaatgacgaagctctctggtatctctgaaattatccctgagatggagatctgtgattttgacttcgaaccctgcggctactccatgaatgcaatccatggctctgcgttctccacgatccatgtgacgcctgaggatgggttcagctacgccagttatgaggttatgggcttggatgccactgccctgtcttacggtgaccttgtcaagagggtccttgggtgcttcggcccctcggaattttctgtcgccgtgaccatcttcggcgggcggggccaagctgggacatggggaaaggaacttggtgcggaggcttatgactgcaacaacatggtcgagcaggagctgcctggaggtgggatcctcatctaccagagcttctgtgctgctgaagacgccgttgctagctcgcccaaatccgttcttcgctgctttgatggcgagaatgcagcaccttttgcgaaggactgcaagctggctaatcttgtctgcttggaggaagttggatgctatcgaggagaaggatggagtgcttgatgagtaagacgggtttctggtgtcgatttgcttctgagtttttttctttttatatcgttgcgatctcgtggttgtcgtttggttagcagccaagccaggctattagtacgaagaatgtcgtctataaacatgtgttcctacgttgccacatgctgagtcaatctgtatacagctagctctaggtggtcagctgcgtctaccacaatgagcatacatgtatggataaatcttctgtgaaagcattcgatgaataaaaaaaaaaaaaaaaaaaaaaaaaaaaag

SEQ ID NO: 90 - DNA, 2082 bp, Zea mays
  CDS (581)..(1780)
ccacgcgtccgcccacgcgtccgaaagaattccctcccctagccgccgccgccgccgctcgtctccctgagaggtgccgggaccgaggaactggccgagtactaggtagagaatcggtttttcttgtctcagcccggggtctgctgcgtctggtggtggtgaaggggagaaattcgtgagatctgttccggatcaggcgtgcgagctcgggaatcaggggtttcacacatagcttcgtcgatttgaatttgatgtactaatggagtctaagggtggcaaaaagtctagcagtagtcgttctatgatgtatgaagctccccttggctacagcattgaggacgttcgacctgccggaggcgtgaagaagttccagtctgctgcttactccaactgcgcgaagaagccatcctgatatcccttttggcttcctcattctagtagtttaggatttcttttctgacactttgattctgaccaatctctctggcctgctgcttcctgataatcgaccagttccccagtcttgctccttgcactcctccctccatctccagcattgtgttctgattcacctgctccaatggctgttctttctgctgctgatgcttccccggtctcagctatcgggtttgagggctatgagaagcgccttgagatcacattctctgaggcacctgtctttgtggaccctcatgggcgtggtttgcgtgccctctccagggcccagattgactctgttctggatcttgcacggtgcacaattgtgtctgagctctccaacaaggatttcgactcatatgtcctttctgagtcaagcttgtttatctatcctctgaagattgtcatcaagacctgtggcactaccaagctcctgctcaccattccaagaatccttgagcttgctgaagagctgtctatgccacttgctgctgtgaagtactcccgtgggacgttcatctttcctggcgcacagccagccccccacaggagcttctctgaggaagttgctgcacttaaccgctactttggcggcctgaaatctggtggtaatgcttatgtgattggagatccagcaagacctggacagaagtggcacgtcttctacgccactgagtacccagagcaaccaatggttaaccttgagatgtgcatgactggtctggacaagaagaaagcttgtgtctttttcaagactaatgctgatgggaacacaacatgtgccaaggaaatgacaaagctctctggcatctctgaaatcatccccgagatggagatctgcgattttgacttcgaaccctgtggctactccatgaatgcgatccatggctctgcattctccacaatccatgtgacgcccgaggacggtttcagctacgccagttacgaggttatgggcttggatgccactgctctgtcttatggtgaccttgtcaagagggtcctccggtgctttggcccctcagagttttccgttgccgtgaccatcttcggcgggcgtggccatgccgggacatggggaaaggcacttggtgcagaggtctatgactgcaacaacatggtggagcaggagctgcctggaggcgggctcctcgtgtaccagagcttctgtgctgctgaagacgctgttgctacctcgcccaaatctgttttccactgctttgacggcgagaacgtggagagtgctcctcctcctatgaagaaggactacaagctggctaatcttctctgctgggaggaggaagcggatgccatggaggagaaggcgggagtgcttgatgagtaagacgggcttctggggtcgatttgcttctgagttgtttattttatatcgtcgcaatttcgtggttgtcgtttggttattctgtgaagcagccaagccaggctattgttatgaaaatttgtcgtctgtaagcatgtgaacttccgatgttgccacatgctggatcagtctgaataagtaagtatgcagctctaggtggtcagctgcgtctaccacaatgagcatgaacgtatggagaaatatctgtgaacccattttgtttatgaataagatttgtttttttcgaaaaaaaaaaaaaaaag

SEQ ID NO: 91 - DNA, 1409 bp, Glycine max
  CDS (26)..(1129)
gaagaagagagagacagacagaacaatgggggaagcaaagggaaaggaagaagaagtgttagcctcagttcactcaaccgtgttcaaagaatcagaaagccttgatggaaagtgtgttaagattgagggctatgatttcaaccgcggcgtcaattatccgttgctactcagctccatggtcacaactgggtttcaagcttccaacctcggtgatgccatccaagtcgttaatcaaatgctagattggaggctagttgatgaacccgtagctgaggattgcagtgaccaagagagggatttggagtaccgaaaatctgtgacgtgtaaagtgtttctgggtttcacttctaatcttatttcttctggtgttagagatactgtgaggtttcttcttcagcatcgcatggttgatgtagttgttacaactacaggtggcattgaagaagatcttataaagtgcctggcaccaacatataaaggagatttctctttgcctggagcatatctgcgctcaaaagggttgaatcggattggtaatttattggtcccgaatgacaactattgcaaatttgaggactggattattcctatctttgatcagatgttgggggaacaaaataatgagaatgtgttgtggacaccatctaagttaatagctcgattgggaaaagaaataaaaaatgaaagctcttacctttactgggcatacaagaacaacattccagttttctgtccgggcttaactgatggctcattgggggacatgctgtacttccattccttccgcaatcctggtctgattgtggacatagtgcaagatataagggcaatgaacggtgaagcagtacatgcaagtcccaggaagaccggaatgataattttaggaggtggccttccaaaacatcacatttgcaatgccaatatgatgcgcaatggtgcagactatgctgtttttatcaatactgcacaagaatatgatgggagtgattctggagctcgtccagatgaagctgtttcatggggaaagatacgagactctgctcagactgttaaggtacactgtgatgcaacaatagcatttcctctgctggttgctgaaacgtttgcttcaaaagtgaaacctccccattgatgaaggttaaagatgaatttactctgaagttcattttaattgtgtgtgtttgaggatcttgatggacaagttcggcattggtgttcaatttgactatcatttgattcctaagctcctcttagcagtggagacctttttgaccattcaaaggtaatccattaatcctgtcagtgaggaagtcaggaattatagatgtgaggatcattgtactaatatctttagggaaaataaggctaagaaaactaactgatcatatatggcatttttaatattttcc

SEQ ID NO: 92 - DNA, 1505 bp, Zea mays
  CDS (54)..(1163)
aggctgctgtctcacggctgcggctgcggcggttcgggctccagactccagggatggccgccggtgcgggaggcggcgaactggaggcgctggagggcgtgcgctccatcgtgctcaagccgtcggagtcgctcgacgagtcgcgtttcacgaggatcgccggcgccgacttcaacgacccggccatcggactccaggggctgctcgcctcgctcgcgtccaccgggttccaggcatccaacctcggcgacgccatcgacgtcgtcaaccagatgttagactggaggttgtcgcatgagaagcccagcgaggattgtgatgaagctgaacttgaccctaaatatagagcatctgtgaagtgcaagatatttctgggcttcacctcgaacctcgtgtcttctggcatccgggatataatccgttttctagctcagcatcacatggtggatgttattgttacaagtgctgggggtatagaggaggatctcattaaatgccttgcaccaacttacagaggcgatttttctttacctggagcactgctgcggtcaaaaggactgaaccggataggaaatctgttggtgcccaatgacaactattgcaagtttgagaactggatcatgccactcttcgaccagatgctacaggagcaatctactgagaatgtttggacaccgtcgaaggtgatagcgcgccttggcaaagaaataaatgatgaaagctcctatctttattgggcatacaagaataacatccctgtatactgcccagcattgactgatggatcacttggagacatgctgttctgtcatgcagttcgtaatcctggccttattattgacattgtacaagatatacggctgatgaatggggaagccatccatgcaacaccaaggaagacagggattatagttcttggtggaggccttccaaagcatcatatatgcaatgccaatatgttccgcaatggtgcagattatgctgtctatattaacacggctcaagagtttgatggtagcgattctggagcacaccccgatgaagcagtctcatggggcaagatcaagggttcagcaaaacctgtaaaggtgcattgcgatgcaagtatcgctttcccgcttcttgttgcagcaacatttgcacgtaaggttcataactccaaatgaacagactgaatcggattcggtggagtgaatgggcaacagaattttgttgaactctccaaatgaccttttggagcacgaggtctacttcacctgcacagggatcatgtgcaagttttttcggtgactcgcggcaaccacatgccatcattattcgatgttcacttgatgctgtactagctggttgatagcatttttgttacaactgataatttattgaaatacagacatacgattgttcatccgagtcgtctgcttacgaattttttgtagacgaaacatctgcttacgaaattgacaaatggcctgttttatgaacacattttttttcacctgaaaaaa

SEQ ID NO: 93 - DNA, 820 bp, Zea mays
  CDS (85)..(564)
cccacgcgtccgtccccatccgcacctctctccatctccctgctcctccgcctccttcttgatccagccaagccagggatcgccatgtcggactcggaggagcaccacttcgaatcgaaggccgacgccggagcgtccaagacctacccgcagcaggctggcaccgtccgtaagaacggcttcatcgtcatcaagaaccgcccctgcaaggttgtggaggtttctacctcaaagactggtaagcatggccatgccaaatgccactttgttgccatagacatattcaacgggaaaaagctcgaagatattgttccttcgtcacacaactgtgatattccgcatgtgaaccgtactgagtaccagctgattgatatatcagaggatggatttgtgagccttcttacttcagatggcaacactaaggatgatcttagactcccaactgatgagactcttgtggcccagatcaaggaagggtttgaaagcggcaaggatcttgttgtgactgtccagtctgctatgggggaggagcagatctgcgcgctgaaggatgttggccccaagtaacttccctgccttggaatactgtatctcaaaacctaaatcgaaaaaagaagtgtatcaaggattgctacagagacatccatctggcttgagctggcttttgctatggcaaacacaagtgcagggatcgctgggtgttgcaccgtgtctgcattatgtggttacattctggaccctgtattttctatgcttttatgcccctactgtttagtattaattatcaataaatttgtttgggacggttgaattgcaaaaa

SEQ ID NO: 94 - DNA, 804 bp, Oryza sativa
  CDS (108)..(527)
gcaaacgtgtcgcccattctacaccgtctccatccatctcatctcgtcgtcttcccccccgcgagtccgcgaccccccgcgctataaaatccaaggccgcgatcgagatgcggaaatatcgagtcgccggattggtagccgccctgctcgtgctgcattcgctagccacgccgtccgctcaggccgaggcgcatcgcgcagggggagaaggggaggagaagatgtcgagcgacggagggccggtgcttggcggcgtcgagccggtggggaacgagaacgacctccacctcgtcgacctcgcccgcttcgccgtcaccgagcacaacaagaaggccaattctctgctggagttcgagaagcttgtgagtgtgaagcagcaagttgtcgctggcactttgtactatttcacaattgaggtgaaggaaggggatgccaagaagctctatgaagctaaggtctgggagaaaccatggatggacttcaaggagctccaggagttcaagcctgtcgatgccagtgcaaatgcctaaggcccatctcgtatcctatgtgtatcaagttatcaagaagatggggaataatatggtgtggatatagctattggacatgttaattatccacatgataatatggcttggatataaggatctcacacgataatatggcttggatatatagctattaaagattttacctatggcatatttcaatgtgtattagtactaagtaagaatgattgcaaggtgtattaactacaaatattgcaataaaagtccctgttactacaacttacaagtaaaaaaa

SEQ ID NO: 95 - DNA, 1038 bp, Oryza sativa
  CDS (18)..(767)
cgaagggaaagtttgggatgcgcgttgctgcgacgacgcggcccgcctcctcctccgccgccgctccgctccccctcttcctcctcctcgccgtcgccgccgccgccgccgccctgttcctcgtcggctccgcgtccctcgccatggccggccacgtcctcggcggcgcgcacgacgccccctccgccgccaacagcgtcgagaccgacgcgctcgcccgcttcgccgtcgacgagcacaacaagcgcgagaacgcgctgctggagttcgtgcgggtggtggaggcgaaggagcaggtggtggccggcacgctgcaccacctcacgctcgaggccctcgaggcggggaggaagaaggtgtacgaggccaaggtctgggtcaagccgtggctcgatttcaaggagctccaggagttccgcaacactggggatgcaaccaccttcaccaacgccgacctcggcgccaagaaaggtggacatgagcctgggtggcgtgatgttccagtacatgatcctgtagtcaaagatgctgcagaccatgctgtgaaatcaatccagcagaggtcaaactccctgtttccatatgaacttctcgagatcgttcgtgcaaaggcagaggttgttgaagacttcgtaaagtttgacattctgatgaaacttaagaggggaaacaaggaggagaagttcaaagccgaggtccacaagaaccttgaaggggcatttgtactgaaccagatgcaacaagagcatgatgaatcgagcagccagtgaaccttgccacattaagctgtagttatgtagtttgtgttcaataagaaaacagtgaacatgcacccttccgtttctatcgggacataggctggaacttgttcctaacatcgatgaaaagaagacactacactatccttttgttcctgttgctcttagtgtgataatacgatactggtcgtgtaacttctcaagggaaccgtgggtctatgccatacagcttgtgaatgtgaaatcctatgttgatacttctcaaaaaaaaaaaaaaaaa

SEQ ID NO: 96 - DNA, 756 bp, Sorghum bicolor
  CDS (135)..(461)
cgcgatctagaggagcaacaaccattcggcggtgcaagtgctactcctgctccttcccactagcggtagtgcccgtcgtctcgccgccgcctcctctccctccgggctcccgccgccggaccgcgtcgtcagcgatggccgaggcacacagcgggcggcgcgtggggatggtaggcgacgtccgggacgcgccggagggccacgagaacgacctcgaggccatcgagctcgcgcgcttcgccgtcgacgagcacaacagcaagaccaacgcgatgctggagttcgagaggctggtgaaggtgaggcaccaggtggtggccgggaccatgcaccacttcaccgtccaggtgaaggaggccggcggcggcaagaagctgtacgaggccaaggtgtgggagaaggtgtgggagaacttcaagcagctgcagagcttccagccggtcggggacgccgcggtcgcctgaggtagtgaaggtatcatcttccagtgccatgatgtgtttttcccctcgaggctcacaagcttttggctgggggctggagcacaagaatgaaagaatttagccgtcggacatggaatacatcccccactgggaaagtatatatgatatgatgaataaaccagcatcttaccacatgtattgtacgctgtatgaaatatcgactcctgtaatggaatgagctgtgctaagaaaaaaaaaaaaaaaaaaaaaaaaaaaaaaaaaaaaaaaaaaaaaaaaaaaaaaaaaaaaaaac

SEQ ID NO: 97 - DNA, 3317 bp, Zea mays
  CDS (113)..(3061)
ccacgcgtccgcccacgcgtccgcccacgcgtccgcccattctctcacacccaacacccagctatcacaccctgatccccgaggccgcgcgtcggggtgaggaggaggggccatgatggagtcggcggcggcccagtcctgcgcggcgtgcggggacgacgcgcgcgctgcctgccgcgcgtgcagctacgcgctctgcagggcgtgcctcgacgaggacgccgccgagggccgcaccacatgcgcgcgctgcggaggggactacgccgctatcaacccagcgcgcgccagcgagggaaccgaggcggaggaggaggtggtggagaaccaccacaccgccggtggcctgcgtgagagggtcaccatgggcagccacctcaatgatcgccaggatgaagtaagccacgccaggaccatgagcagcttgtcgggaattggtagtgaattgaatgatgaatctggtaagcccatctggaagaacagggtggagagttggaaggaaaagaagaatgagaagaaagcctcggccaaaaagactgcagctaaagcacagcctccgcctgtcgaagaacagatcatggatgaaaaagacttgacagatgcatatgagccactctcccgggtcatcccaatatcaaagaacaagctcacaccttacagagcagtgatcattatgcggttaattgttcttgggctcttctttcactaccgtatcaccaatcctgttaacagtgcctttggtctctggatgacatcagttatatgtgagatctggtttggtttctcctggatattggatcaattcccgaagtggtatcctatcaatcgtgagacttatgttgataggctgattgcacgatatggagatggtgaagaatctgggttagcacctgtagatttctttgtcagtacagtggatccattgaaagagcctccactaatcactgcaaacactgtgctgtctattcttgctgtggactatcccgttgagaagatctcatgctatgtatctgatgatggttctgctatgctcacatttgaatcgctcgcagagactgcagaatatgctagaaagtgggtgccgttttgcaagaagtacgccattgagccacgagctcctgagttctacttctcacagaaaattgactacttgaaggacaagatacacccatcttttgtcaaggagcgtagggctatgaagagagactatgaagagtacaaggtgaggataaatgctttggttgccaaggctcaaaagacacctgatgaaggctggatcatgcaagacggtacaccatggcctgggaacaatcctcgtgaccaccctggcatgatccaggttttcctgggtgagactggtgcacgggactttgatggaaatgaacttcctcggttagtgtatgtgtcaagagagaaaagaccaggctaccaacaccacaagaaggcaggggctatgaatgctctggtccgagtgtctgctgttctgacaaatgccccttacattcttaatcttgattgtgatcactatgttaacaacagcaaagctgttcgtgaagcaatgtgcttcatgatggaccctactgttggcagagatgtctgctatgtacaattcccccagaggttcgatggcattgatcgcagtgatcgatatgccaataggaacgttgtgttctttgatgttaatatgaaaggacttgatggcctccaaggcccagtttatgtgggaactggttgttgtttcaataggcaagcactttatggttatgggcctccatctctgcccgcacttccaaagtcttcgatttgttcctggtgttgctgctgctgtcccaagaaaaaggttgaaagaagtgagagggaaatcaacagagactctcggcgagaagacctcgagtctgccatttttaaccttcgcgaaattgacaactacgatgagtacgagaggtccatgctcatctctcagatgagcttcgagaagtcttttgggctgtcctcggtctttattgaatcgacccttatggagaatgggggcgtccctgaatctgcaaacccatctaccctaattaaagaagccattcatgtcattagctgtggatatgaagagaaaactgaatggggaaaagagattggctggatctatggttcagttacagaggatattctgactgggtttaagatgcactgccgtggctggagatccatctactgcatgccggtgagacctgcattcaagggatcagccccaatcaatctttccgatcgtcttcaccaagttctccggtgggctcttggttctgtcgagatcttcttcagtcggcactgcccgctgtggtacggttacggtggcggccgtctgaaatggctccagaggctctcctacatcaacaccatcgtgtacccgttcacttctcttcctctcgttgcctactgttgcctgcctgccatttgcctgctcacaggaaagttcattatacctacgctgtccaacgctgcaacgatatggtttcttggcctcttcatgtccatcatcgtgacgagcgtgttggagctgcggtggagtggcatcgggatcgaggactggtggcgcaacgagcagttctgggtcatcggaggcgtgtccgcgcacctgttcgccgtgttccagggtatcctcaagatgattgccgggctggacaccaacttcacggtcacggcaaaggccacggacgacactgagttcggggagctgtacctgttcaagtggacgacggtgctgatcccgcccacaagcatcctggtgctgaacctggtgggcgtggtggctgggttctcggccgcgctcaacagcggctacgagtcctggggcccgctcttcggtaaggtgttcttcgccatgtgggtgatcatgcacctgtacccgttcctcaagggtctcatgggccgccagaaccgcacgccgaccatcgtggtgctctggtccgtcctcctcgcctccgtcttctccctcctgtgggtcaagatcgacccattcgttggaggaaccgagaccgtcaacaccaacaactgcaacacgatcatctgctgattcaccatcggtcagctgctgtcgtgccgcggcggacgtgtttctggtgttgcaaacgtgggttgcctgcctgatgcgggtctcctctgtctatctcgcatctgggcttttgccccaggatctgaagcgggtggtgtaggttagctttattttgcgtccaagtgttgattgatgttgtctgtgttatgaaaagttttggtggtgaaacctgaaatgttaaaattcggctcaaaaaaaaaaaaaaaaaaaaaag

SEQ ID NO: 98 - DNA, 1900 bp, Glycine max
  CDS (138)..(1496)
attcggctcgagcttctttgtctctcatctgtctgaggatttttccatcttagttcctggaggcaccaggaacctgacccaataaacaaacccttttttttctttctaatttttctaaagtttcattttttaatccaatggcaacttgggtattatcagaatgtagcttgaagcctcttgctccagtaatccctagacctagaactggggcagttttgtccagcacctcaaaggttggatttttggagacaaacaaggtattggaaggttctaagtttcaacctttgaggtgtaaccttagggagaggaattgggggttaaaagtgagtgtccctttgaggattgcttccattgaagaggaggagcaaaagagtgtcgatgtaatcaatgggagtaatggggttgagcatgagaagcttccagaatttgaccctggtgctccaccaccattcaacttagctgatattagagcagcaattccaaagcattgctgggtgaaggaccctttgaagtccatgagctatgtggtgagggatgtcattgctgtctttggtttggcttctgctgctgcttatctcaataattggttggtttggcctctctattgggctgctcaaggcactatgttctgggctctgtttgttcttggtcatgattgtggtcatgggagcttttcaaacaaccccaaattgaacagtgttgttgggcatctgctgcattcttcaattctagtgccatatcatggatggagaatcagtcataggactcatcaccaacatcatggtcatgttgaaaatgatgaatcatggcatccgttgcctgaaaaattgttcagaagcttggacactgtaacacgtatgttaagattcacagcaccttttccacttcttgcatatcccgtgtacctttggggtaggagtcctggcaagactggttctcactttgaccctagcagtgacttgttcgttcccaatgaaagaaaagatgttattacttccacagcttgttgggctgctatgttgggattgcttgttggattggggtttgtaatgggtccaattcaacttcttaagctttatggtgttccctatgttatattcgtcatgtggttggatttggtgacttatttgcaccatcatggccatgaagacaaattgccttggtatcgtggaaaggaatggagctaccttaggggtggtctaactactcttgatcgtgattatggattgatcaataacattcaccatgacattggaactcatgtcattcatcacctatttcctcaaattccacactatcacttagttgaggctactgaggcagctaagccagtgtttggaaaatattatagagaaccaaagaaatcatctcctcttccttttcaccttattggggaattaataaagagcttcaagactgaccattttgttagtgacaagggggatgttgtgtactatcaaactgactctgagattaatggctcgtccaaatcagagtgaagattaaaattcttttttatatagacaagagagacttatacacaattcttattgctctaaagattgtcttgagtttcttacttagagttgaatccgtcattaataaagggatagatggacggatcatataatttcaattgtaactacatgatataatgtttaggttatatgtagtttatcattcttgaacagtgaatcctctgtataaattgattatattgaagtggtaccttgagtcatgatcaaattgttaatgtatttgatcagaactgaaagacctcgattaaatagtaatttaaaataaattgttttatagaatgttgcggtgttttcttaccagttaccatcccctatttaatttatatactccctattttattcttcaaaaaaaaaaaaaaagg

SEQ ID NO: 99 - DNA, 1662 bp, Arabidopsis thaliana
  CDS (132)..(1472)
gcaaagtagaaaacacaagtttctctcacacacattatctctttctctattaccaccactcattcataacagaaacccaccaaaaaataaaaagagagacttttcactctggggagagagctcaagttctaatggcgaacttggtcttatcagaatgtggtatacgacctctccccagaatctacacaacacccagatccaatttcctctccaacaacaacaaattcagaccatcactttcttcttcttcttacaaaacatcatcatctcctctgtcttttggtctgaattcacgagatgggttcacgaggaattgggcgttgaatgtgagcacaccattaacgacaccaatatttgaggagtctccattggaggaagataataaacagagattcgatccaggtgcgcctcctccgttcaatttagctgatattagagcagctatacctaagcattgttgggttaagaatccatggaagtctttgagttatgtcgtcagagacgtcgctatcgtctttgcattggctgctggagctgcttacctcaacaattggattgtttggcctctctattggctcgctcaaggaaccatgttttgggctctctttgttcttggtcatgactgtggacatggtagtttctcaaatgatccgaagttgaacagtgtggtcggtcatcttcttcattcctcaattctggtcccataccatggctggagaattagtcacagaactcaccaccagaaccatggacatgttgagaatgacgaatcttggcatcctatgtctgagaaaatctacaatactttggacaagccgactagattctttagatttacactgcctctcgtgatgcttgcataccctttctacttgtgggctcgaagtccggggaaaaagggttctcattaccatccagacagtgacttgttcctccctaaagagagaaaggatgtcctcacttctactgcttgttggactgcaatggctgctctgcttgtttgtctcaacttcacaatcggtccaattcaaatgctcaaactttatggaattccttactggataaatgtaatgtggttggactttgtgacttacctgcatcaccatggtcatgaagataagcttccttggtaccgtggcaaggagtggagttacctgagaggaggacttacaacattggatcgtgactacggattgatcaataacatccatcatgatattggaactcatgtgatacatcatcttttcccgcagatcccacattatcatctagtagaagcaacagaagcagctaaaccagtattagggaagtattacagggagcctgataagtctggaccgttgccattacatttactggaaattctagcgaaaagtataaaagaagatcattacgtgagcgacgaaggagaagttgtatactataaagcagatccaaatctctatggagaggtcaaagtaagagcagattgaaatgaagcaggcttgagattgaagttttttctatttcagaccagctgattttttgcttactgtatcaatttattgtgtcacccaccagagagttagtatctctgaatacgatcgatcagatggaaacaacaaatttgtttgcgatactgaagctatatataccatacattgcattatcttagataaaaaa

SEQ ID NO: 100 - DNA, 1525 bp, Arabidopsis thaliana
  CDS (61)..(1368)
agagagtgcaaatagaacgacagagactttttcctcttttcttcttgggaagaggctccaatggcgagctcggttttatcagaatgtggttttagacctctccccagattctaccctaaacacacaacctcttttgcctctaaccctaaacccactttcaaattcaatccaccacttaaacctccttcttctcttctcaattcccgatatggattctactctaaaaccaggaactgggcattgaatgtggcaacacctttaacaactcttcagtctccatccgaggaagacacggagagattcgacccaggtgcgcctcctcccttcaatttggcggatataagagcagccatacctaagcattgttgggttaagaatccatggatgtctatgagttatgttgtcagagatgttgctatcgtctttggattggctgctgttgctgcttacttcaacaattggcttctctggcctctctactggttcgctcaaggaaccatgttctgggctctctttgtccttggccatgactgcggacatggtagcttctcgaatgatccgaggctgaacagtgtggctggtcatcttcttcattcctcaattctggtcccttaccatggctggaggattagccacagaactcaccaccagaaccatggtcatgtcgagaatgacgaatcatggcatcctttgcctgaaagcatctacaagaatttggaaaagacgactcaaatgtttaggtttacactgccttttccaatgctcgcataccctttctacttgtggaacagaagtccagggaaacaaggttctcattatcatccggacagtgacttgtttcttccaaaagagaagaaagatgttctgacatcaactgcctgttggactgcaatggctgctttgcttgtttgtctcaactttgtcatgggtccaatccagatgctcaaactatatggcatcccttattggatatttgtaatgtggttggacttcgtcacttacttgcaccaccatggacatgaagacaagctcccttggtatcgtggaaaggaatggagttacctgagaggagggctcacaacattagatcgtgactacggatggatcaataacatccaccacgatattggaactcatgtgatacatcatcttttcccgcagatcccacattatcatctagtagaagcaacagaagcagctaaaccagtactaggaaagtactacagagaaccgaaaaactctggacctctgccacttcacttactgggaagcctcataaagagtatgaaacaagaccatttcgtaagcgatacaggagatgtcgtgtactatgaggcagatccaaaactcaatggacaaagaacatgaggacatactgcagtgaaccaggcagacaagttacataaattcatcttggcccattcattatgttctttttgttttggtgtaaagccttttcgagattaaaaaagcattaatttgtagaaacctgtggtaaaactctcgatcaaatgaaataagatat

SEQ ID NO: 101 - DNA, 2001 bp, Synechocystis PCC6803
  CDS (643)..(1719)
ccatccttgggcaggattagtgttttggtgggcggccctagaaagacaggtacgggtggatggtcaagtggaaaaaattgatccggcagaatccgatgcctattttcagtcccgtccccggggttctcaattgggggcctgggcttctccccaaagtcggattgttggcgatcgccaggagttagaagacaatctagcccgttgggaaaaacaatacgaaaaccaatccattccccgccccccccactggggaggatttcgagtgattccccatcgcatcgaattttggcaaggccgccctagtcgtctccatgaccgtttgcaatttaatttgcttgatggtcaatggcacagacagaggttggcgccgtagaagttaaactagcccccattccattgcagtcttaaagttttgacgttttagtccataaagttgatcagagttgcgtatttataaacatttgaactttttatcgtcctttctctacacaaatttgaatcaagtattctccttagtgtgttttctgtcttagtcaaaattggtcttactgccgaattttcatcttccaacggcagccttctttgaagatttaggatagaatcataggattgttttgccgtcatagcccctaagataaatacgtgcgtctagaaatttcatcgcctcaaacaaagcttccttaccccaaaactgaagaattaccatttaccctccaagagctcagaaacgctattccagcggattgttttgagccatcggtagtccggtccttgggctacttttttttggatgttggtttaattgccgggttttatgctctagcggcctaccttgattcctggttcttctatccgattttttggttaattcagggaaccctattctggtccctgtttgtggtgggccatgattgtggccatggctccttttccaaatccaaaacccttaataattggattggtcatctcagccacacgccaattttggtgccttaccatggctggcgtattagtcatcgtactcaccatgccaacacgggcaatatcgacaccgacgaaagttggtatccagtgtcggagcaaaaatataaccaaatggcctggtatgaaaaacttctacgtttttacttgcctctgatcgcctaccccatttatctatttcggcgatcgccaaaccggcaaggctcccatttcatgcccggcagtcccctattccgtcccggagaaaaagcagctgttctcaccagcacctttgcccttgcagcctttgtcggcttccttggctttttaacttggcaatttggctggctatttttgctgaaattttatgttgccccctacctcgtgtttgtggtgtggttagatttggtcacatttttacatcacactgaagacaatatcccttggtatcgtggtgatgactggtattttctcaaaggtgccctctccaccattgatcgggattacggcttcattaaccccattcaccatgacattggcacccacgtcgcccaccatattttctcgaatatgccccactacaagttacgccgggcgactgaagccatcaagcccattttaggggaatattatcgatattctgacgagccaatttggcaagctttttttaagtcctactgggcttgccattttgttcctaatcaaggttcaggggtctattaccaatccccatccaatggtggatatcaaaagaaaccttaattgatcctaattgaatcaaaccaacatcgggagggaaggcaatattagatggtattactcccttccgatcgccttatgagaagtatggaagaagttaaacaatcacactccaaaagatcagcattaaaccaacaacggtgctgtggtgaggcagaagattgaaaaaggattgtttacctaactgttgactgagaaaaatcgaccaaagtaccccggccaaaagcagcataccttgcaaaaaggcgatcgccgctggatccgccaccaacatcggtaaat

SEQ ID NO: 102 - DNA, 945 bp, Zea mays
  CDS (3)..(758)
agatgatgcttagggtttccgcgtctccggccgccgcggtggccaaccatctctctggtggggccgcggcgaccacggctcctgccagggtgacggcgcagcgcagcggcgtctcgctgtccgccgccgccgccgccggcaaggggaaggaggtgctcagcggggtggtgttccagcccttcgaggagatcaagggggagctcgccctcgtgccccagtcccccgacaggtcgctcgcgcgccacaagttcgtcgacgactgcgaggcagccatcaacgagcagatcaatgtggagtacaacgcctcgtatgcgtaccactccctcttcgcctacttcgaccgcgacaacgtggccctcaaaggatttgccaagttcttcaaggaatccagcgacgaggagagggagcacgctgaaaagctcatggagtatcagaacaaacgcggaggcagggtgaggctccagtcgattgtggcgcctttgaccgagtttgaccaccccgagaaaggcgatgctctgtacgctatggagctgactctggctctggaaaagctggttaatgagaagctgcacagcctgcatggtgtggcaacaaggtgcaatgatcctcagctgatagacttcatcgagagtgagttcctcgaggagcaggtggaagccataaataaggtctccaagtatgtcgcgcagctgaggagagtgggcaacaaggggcacggggtgtggcactttgatcagatgctgcttcaggaaggggcctgaaggccaacaagggtggcgtggacggagctgagctctgggtggtgtattcttttctttttcttttctttccagttggttagtgttttagttgtagaacggtgttgcgttgcccacatgacatgatggatgttacgtggaggattgtctcttatatttgaacattatattgtcgttcgtttttggc

SEQ ID NO: 103 - DNA, 1213 bp, Zea mays
  CDS (34)..(795)
gcgaacgcacacgcacccacacgacacatccagatgatgcttagggtttccccgtccccggccgccgcggtgccaacccagctctccggtgcgcccgcgacccctgctcccgtcgtcagggtggcggcgccgcgcggagtcgcctcgccgtccgctggcgccgcgtgcagggccgcgggcaaggggaaggaggtgctcagcggggtcgtgttccagcccttcgaggagatcaagggggagctcgccctcgtgccccagtccccagacaagtcgctcgcgcgccacaagttcgtcgatgactgcgaggccgccctcaacgagcagatcaacgtggagtacaacgcctcgtatgcataccactccctcttcgcctatttcgaccgcgacaacgtggctctcaaaggatttgccaagttcttcaaggaatccagcgacgaggagagggagcacgctgaaaagctcatggagtaccagaacaaacgtggaggcagggtgaggctccaatcgattgtgacgcctttaaccgagtttgaccaccctgagaaaggagatgctctgtacgctatggagctggctctggccctggaaaagctggtcaatgaaaagctgcacaacctgcatggtgtggcaacaaggtgcaatgatcctcagctgacagacttcatcgagagtgagttcctcgaggagcaggtggaagccataaacaagatctccaagtatgtcgcccagctgaggagagtgggcaaggggcacggggtgtggcacttcgatcagatgctgcttgaggaagaggcctaaaaagaagaacggacagatgaatgaaggaaacaagtgtgtaatgttgatcaggcggaggaataatgggtcaactgacaactctgggtcggtggatttgtagttggtttgggttttttagttgtagaacggtgttgcccccctcctagagagggatgaacacattatgcatgcgatgtgtcagttcggtcggtgctatgctcgttgggatttgattgtcggaaataaaacatgggtgatgaatgtgtaccctccctaatctatgtcttggtgatgaagttgagaaagccctgcgggtgtaggtggatttgtagagttttttcttcagttggttaggttcgctgttgcctacctcatttgcccctcatcatcgccgtaatttatttatttataatataaaagatccagattttccccc

SEQ ID NO: 104 - DNA, 1001 bp, Escherichia coli
  CDS (245)..(742)
gttccttatgtttgaatacggaattcactttgtcatatcagtgccatcattccgccttccctgtctttctctaaatattttaatcagcgaggggatcttcgctgattaaagaaatagcggtaatgcgttttattcccattcgtatttttaataattgaagtttatattttaccttttgcaaataataaaataacaaattatagtgacgccacagcaacaaatataacctttgtggagcactatcatgctgaaaccagaaatgattgaaaaacttaatgagcagatgaacctggaactgtactcttcactgctttatcagcaaatgagcgcctggtgcagctatcataccttcgaaggtgctgccgcgttcctgcgccgtcacgcccaggaagagatgacgcatatgcagcgtctgtttgattacctgactgataccggcaatttaccgcgtattaataccgttgaatctccgtttgctgaatattcctcacttgatgaattattccaggaaacctataaacacgaacaattaatcacccagaaaattaacgaactggctcatgctgcaatgaccaatcaggactacccaacatttaatttcctgcaatggtatgtttctgagcagcatgaagaagagaaactgttcaaatcgattattgataaattaagcctggcaggcaaaagcggcgaaggtctgtattttatcgacaaagaactctctaccctcgacacacaaaactaatgctctccggcggcaggtttactgccgccgtttcaaatcagtgacggcaaatcttactctgatcggtcgaaaaaccgtctttcgaaggtataaatttgccttttgctgccagaaacgctaccagctctcccgctgtcatcccttctgccgagcaggtgtgaaaacgtgcctgttcaccaaaacgcgctttaatcgcagcttccagactggcatgcgtatattgctcgcctgattcaatcatcatatttaacacttcatg

SEQ ID NO: 105 - DNA, 1304 bp, Aspergillus nidulans
  CDS (146)..(1186)
caaacaaagggatcgtcgtcctgacttttattttatagtccagagatccgtcttgtctgacatctactgccaaaccacaggtgtctgttcaattgcgctggttgtgccctgatttctgaattctctttccgccgcatactccgcaatgccatctactacaagccgcgctgccttcgaggcggtcttcccctccctggctgaggccatgcttgaccatgcgaggaaatacaacctgccccaaaatgctcaggaatggttcagcaaggccattcacaccaacgtccctggcggcaagctcaaccgcggtctctctgtccccgacaccggcgtggccctcctgcagaaggaactgagcgaggagcaatacaaggaccttgctacacttgggtggctgaccgagctgctccaggccttcttcctcgtcagcgatgaccttatggatggttcaatcacccgtcgcggccagccctgctggtaccgccaccagggggtcggtctcattgccatcaacgacgctttcctccttgagtccggtatctacgttatcctgaagaagcaattccgttcacaccctgcctacgtcgactttattgagctgttccatgagaccacctggcagacggaattgggccagctgtgtgatctgatcacggcgcccgaggacaaggtcgatctcaacaacttctccatggagaagtacatgttcattgtcacctacaagaccgcctactatagcttctacctcccggttgccctggccctccactaccttcagcttgctacccccgagaacctccgtcaggctcacgacatcctcattccgctcggccaatacttccaggtccaggatgactacctcgatgcgtacggcgaccccgaggtcattggcaagatcggaacagatatccaggacaacaagtgctcttggttagtgaaccaggctctgcagcgctgcagtgccgagcagcgcaaggtgctcgacgctgcctatggtcgtaaggacgctgagcaagaggccaaggtcaaggctattttccgggaattggacctcgaatccgtctacaaggagtacgaggagaagatcgtgggtgagctgaagacgaagatcgcggctgtcaacgagtcggaggggttgaagaaggaggtttttgaggcattcctcgggaagatctacaagcgcagtaaataagcgataggcagcatagtatgccattttgagatacctcgcaatagactaaagacattaattcggattccaaaaaaaaaaaaaaaaaaaaaaaaaaaagcggccgctcgagcatgca

SEQ ID NO: 106 - DNA, 1289 bp, Oryza sativa
  CDS (42)..(1103)
ccctcgcatcgcacgtgaggcagtcgagggatagcggcgcaatggcggcggcggtggtggcgaacggcgcgagcggcgactcctccaaggccgcgttcgcggagatatacagcaggctcaaggaggagatgctcgaggacccggccttcgagttcaccgacgagtcgctccagtggatcgaccgcatgctggattacaatgtgctcggaggaaagtgcaaccgcgggatctctgtcattgatagtttcaagatgttgaagggcactgatgttctgaataaggaggagacatttcttgcctgcacccttggttggtgcattgaatggcttcaagcttattttcttgtgcttgatgatattatggacaactctcaaacacgacgtggccagccttgctggtttagggtgcctcaggttgggctcattgctgtaaatgatggtattatccttcgcaaccatatttcacgaattcttcaacgccattttaaaggaaagctgtattatgttgatctcattgatttgttcaatgaggttgagtttaagactgcttcaggtcaattgttggatcttattactactcatgagggagaaaaggatctcacaaagtacaacttgacagttcaccgccgcattgttcagtacaagacagcttactactcattctatcttccggttgcatgtgctttgctgctatctggtgagaatttggataacttcggtgatgttaagaacattcttgtggaaatggggacatacttccaagttcaggatgattatctagattgttatggtgatcctgagtttattggcaagattggaacggacattgaagactacaagtgctcatggttagttgtgcaagctctcgagcgtgctgacgagaaccaaaagcacattctatttgaaaattatgggaagccagatcctgaatgtgttgcaaaagtgaaggatctgtataaagaacttaatctggaggccgtatttcatgaatacgagagggagagttacaataagctgattgccgacatcgaagcacatccgaacaaagcagttcagaatgtattgaaatccttcctgcacaagatctacaagaggcagaagtagagctaagctcatggagaagctgtttcatgtttgcttggtaactagagtcgtggggacaaataactggtaactagaatcatggggactgttccctgatgttgtgtgtattatggttatgttcgtaccgtgtagtacagcgtgctactccgtaaaataatgaagcatggtgctatttatgcgtgcgtg

SEQ ID NO: 107 - DNA, 1569 bp, Zea mays
  CDS (313)..(1377)
attcggctcgagctagagttaaaaaaacacttacagcacgcagttgtcgtcgtcattgtcttcgactcttcgtggcacctcccgtccataaaaataaacgtgtgcccacaaatctgttcgctcgcattggcaactgaaccgcaccaggcaccacagtcccgtgcggcagtggcagacgcacagcagatcagcagcgcctccctctgcggctctgcctcttgccaaagccccccacagaattcttctccctccccgtctcctctcgcgctcgcgcgtggtgaggtgaggtggagttccgaccccgaggccgcaatggcgacagcggaggtggtggtggccaacggctcgggcggcgccgacaccaagaccgcgtttaaggagatatacagcaagctcaagcaggagatgctcgaggaccccgccttcgaattcactgacgagtcgctccagtggatcgaccgcatgttggattacaatgtgcttggaggaaagtgcaatcgtgggctatctgttgtcgatagctacaagattttgaagggtgttgacgttctgagcaaggaggagacatttctggcctgcacccttggctggtgtattgaatggcttcaagcttattttcttgtgcttgatgatattatggacaactcccagacacggcgtggccagccttgctggtttagagtgccacaggttggtctcattgcagtaaatgatgggattatccttcgcaatcatatctcacgaatccttcaacgccacttcaaaggaaagccatattatgttgatatcattgacttgttcaacgaggttgagttcaagacagcttcagggcaaatgttggatcttatcactacccacgagggtgaaaaggatctaactaaatataacttgacagttcaccgccgcatcgttcagtacaagacagcttattattcattctaccttcctgttgcatgtgcattgctgctggctggtgagaacttggaaaactttgttgatgtaaagaacattctcgttgaaatgggaacatactttcaagttcaggatgactatctagattgttttggtgatcctgaattcattggcaagatcggaactgacattgaagactacaaatgttcctggctagttgtgcaagctcttgagcgtgctgctgagaaccaaaagagcattctgtttgaaaattacggaaagtctgatccagcgtgtgttgcaaaggtgaaggacttgtacaaagagcttaaactggaggaggttttccatgagtacgagagggagagttacaacaagctgattgccgacatcgaggcccagccgagcaaggcagtccaaactgttttgaagtccttccttcacaagatctacaagagggacaagtagacccagatcgtcgacaagctgctccatcgacgcttgcatcaatcgaattactatacttgattgatgcggacgagtaatttgtactatgttgttttgtgttttcattctcctgttgtacggtacaccttaatataataaagcacagtggtactagggatgcaaaaaaaaaaaaaaaaaaaaaaaaaaagg

SEQ ID NO: 108 - DNA, 1225 bp, Triticum sp.
  CDS (65)..(877)
cccacgcgtccgccaagagcgaactgagatcatcctaggaccaggcgcgaccacacaggacaagatgctgctgcttaatccggcgtccgaggcggcggcggcggcgctggacagcatccggcagcagctcctggaggagccaatggcgccggcgcggccggcgtactgccggagcgcgagcttcggcagcctggtggcggaccagtggagcgagtctctcccgttccggcccaacgacgccgacgacatggtcgtctacggtgccctccgcgacgccttctcctgcggctggctccccgacggctccttcgcggccgtcaagcccgagcccctgccctcccccgactcctacgacggctgctgcctcggcagcttcctcgcgtcgccgcccgggctggacgcgccgtgggcggaggaggccgaggtcgcagcgacggcgtcaagggggaagcacttcagaggcgtgaggcagcggccgtggggcaagttcgcggcggagatccgggacccagccaagaacggcgcgcgcgtgtggctcggcaccttcgacagcgccgaggacgccgctgtggcgtacgaccgcgccgcctaccgcatgcgcggctcccgcgcgctcctcaacttcccgctccgcatcggctcggagatcgccgcagccgcgggtcagaagcgtccgtctccccagccagcgagccccgactctcctcctccctcctccagcgcacccgggtcgtcgaagcggagaaagagaggcgaggccgcagcagagtccatgtccatggctctggtgccgcccccgccggtgcaggctccggtccagctgaccctcccagtccagccgtggctcgccaccggcgccgtccagcagctagtgagctgaagcggcgaaagcaacaagtgatcgttctcatgaccgatggccattagttcttccttcatggcttcatgtgttgagcccatggaggaacagagcatcaagatggcgtcaatggcgtaatgcgtcgctcgaagaaaccttgatcagttggaggcaattacgcgccacgccattgtgaaatttgtgtggctccgtgtgaaacttgtcgctagggttagtggcgttggcacagtagcaagtgggtgcagtggaatcccgaagctggtttgtaagaggtggtgagggtgcaggtgcaaaagttgcacagaccttctcctctccaatggagaatcttctttgttaaaaaaa

SEQ ID NO: 109 - DNA, 1801 bp, Saccharomyces cerevisiae
  CDS (33)..(1790)
ttaacaatccaggctgaacaaaacaaggaataatgttacacaggcacggttctaagcagaagaacttcgagaatatcgctggaaaagttgtccacgaccttgcaggtctgcaattgctttctaacgacgttcaaaaatccgctgtccaaagtggtcatcaaggatcgaacaatatgagagatacttcgtctcagggcatggctaataagtattcagttccaaaaaagggactacctgctgatttgtcttaccaactgattcataatgaattaacacttgatggtaatccgcatttgaaccttgccagtttcgtgaacacttttaccactgatcaggcaaggaaattgattgatgaaaatttgaccaaaaatcttgctgacaatgatgaatatccgcaattaattgagctaactcagcgttgtatttctatgctagctcaattatggcacgctaatcccgatgaagaaccaataggctgtgccaccacaggttctagtgaggcaatcatgttgggtggactcgccatgaaaaaaagatgggaacacagaatgaagaatgctggtaaagatgcttccaagccgaacattataatgtcttctgcgtgccaagtggcattagagaagtttacgagatattttgaagtggaatgccgattggttccggtatcccacagaagccatcatatgcttgacccagagtcgttatgggattatgtagatgagaacactattggctgttttgtaattttaggaaccacctacactggccatttggaaaatgtagagaaagttgcagatgtcttgtcccaaattgaggccaagcatcctgattggagcaatactgatattccaatccatgcggatggcgcttcaggtgggtttattatcccatttggctttgaaaaagagcacatgaaagcttatggcatggaacgttgggggttcaaccatccgcgtgtggttagtatgaacactagtggtcataagtttggcttaaccactcccggtctgggttgggtgctatggagagatgaatccttactggctgatgaattgagattcaaactaaagtacctcggtggcgtggaagaaactttcggtttgaatttttcaagacctggatttcaagttgtccatcaatacttcaattttgtttctctaggccattcagggtatagaacacaattccaaaattctctatttgttgcaagagcgttttctttcgaattattgaattcgtcaaaattgcccggatgctttgaaattgttagcagtatccatgaaagcattgagaacgattccgcccctaagtcagttaaagactattgggaacacccccaggcttacaaaccaggtgtaccgctggtagccttcaaattgtccaagaaattccacgaagaatatccagaagtgccacaagcaatcctttcctctttactgagaggtaggggttggataataccaaattacccactaccaaaggcaacggatggatccgatgagaaggaggtattaagagtggttttcagatcggagatgaagttggatttagcacagttgttgatcgttgacatcgagagtatcttgacaaagttgattcatagttacgaaaaggtttgtcatcatatagaacttgcctctgagcaaactccagagcgcaagagttcgttcatctacgaaatgttgctggcattggcatctccacaagatgacatcccaacgccggatgaaatcgaaaagaaaaataagctaaaggaaacaacaacgagaaactatagaggaacatgttgagttgaaaaggt

SEQ ID NO: 110 - DNA, 7421 bp, Oryza sativa
  CDS (4531)..(4851),(5011)..(5139),(6072)..(6560),(6663)..(6722)
gtcgaccgaaaaaatatggaagaatacaatttttagctaaaatttatcatagtttaatacgccgaattgacggcctagtaaatctatatccctttaaaagaaaagaaattagaaataaagtagtgatggtaatagtgaatttgctacttcacctactgcattgaaatttttgcaagttaactcctgaactttttaatattaaaaagatcgaatctaaatgggtagctcctaaaaaaaataaaagtaggatgaatattctctatagcaaaaagtgaaagtacattaatacattattttatctgtagcgagcatggacatttagatggtttctaaaaattatatagtattttgtgtttatcatgattttttcttaggaaaacaacgcttactacacgtactattttcagaatgggctttctttatagaagaaaaataatccatcctttcggaggatcggttgtggtcgttagcaggcattgcttcctttagggatttgttgaaagtgtagcgtggctttgccctctcccgctgattggagtagcgttacctgtcgtacgagttatatttttcttccttggttgttttttttctctccttggtataagttggtctagctaattacattgagtaatatattgacgtataatctttttcgcgttcatgaaaaaattatagaaaaataattttggagcggaaactagtctccgcaggaactctttgatttctgacggactcaacgcctgcgggctgcagcttctccctgctatcctccttcccttttgatatcgggtcgaactttccaggaccggtgctgcgcatgcaagtgatcttctggtttactagatgttcacattttctcctttccagccacggcgaaatgtcagtccatcttcgccggttgactagcaccggtcgccaaacttcaaggaaaccgacgtgcaggattctttcgttgccatgttgtcactcacccgtgccaccatcgcgcagcagaatccttcagcggcaaaccaagaaacgacatcccgttgaaaggtcaggtcaaccgtaatcctcatcacggcatcagtgcatcacctgaggccgacctgctctcccgatccctcgcgaactccccgggaagacgacgaagaccagttacttctacaacgcaaatcgaactatagccgccctgctctgtccaggaagcaacgcgccggcgcgggatgctccactataaaacgcacccgctaatcacatcgacccgccacaccacctatcacagcaacacaagccaaccacaaagaattctcatttccggtaacttttctcaagcctttttggcgctctgagaatcatcacacggaagtcaagcctttgttgttgtcgtgattagtttagtttagtcaccgagatgagctcccgaatggccggagcgacgctgctgcgccacctgggcccccgcctgttcgccgccgagcctgtgtactccgggctcgccgcgagcgccaggggcgtcatgcccgccgccgcgaggattttccccgcgcggatggccagcaccagcagcgccggcgcggacgtcaaagaaggcgcagccgagaagctgccggagccggcggcaacggcggcggcggcggcgaccgacccgcagaacaagaaggccgtcgtgagctactggggcatccagccgccgaagctcgtgaaggaggacggcacggaatggaagtggctcagttttagggtaagcgctcatcaaccattgatgtgtgcgcttctttttttgtttttttgcacggtgaattctcgatttgatcgtgttcatgatgtgtgtttcttttgcattgtgacacagccatgggacacgtacacgtcggacacgtcgatcgacgtgacgaagcaccacgagccgaagggcctcccggacaagctggcgtactggacggtgaggtcgctggcggtgcccagggacctcttcttccagcggcggcacgcgagccacgcgctgctgctggagacggtggccggggtgcccgggatggtgggcggcatgctgctccacctgcgctccctccgccgcttcgagcagagcggcggctggatccgcgcgctgctggaggaggccgagaacgagcggatgcacctgatgaccttcctggaggtgatgcagccacggtggtgggagcgcgccctcgtgctcgccgcgcagggcgtcttcttcaacgcctacttcgtcggctacctcgtctcccccaagttcgcgcaccgcttcgtcggctacctcgaggaggaggccgtgagctcgtacaccgagtacctcaaggacctcgaggccggcaagatcgagaacacgccggcgccggccatcgccatcgactactggcgcctccccgccgacgccacgctcaaggacgtcgtcaccgtcatccgcgccgacgaggcgcaccaccgcgacctcaaccatttcgcatcggtacgcatatgccagcctgaaaacaaccaatctcgcctgcttaatttttgtgtgaacgggtttgagctaaccgatcgcgtttctcgtgttggtacatcacttgtgcaggacatccagcaacaggggatgaagctgaaggatacgcctgcgcctatcgggtatcactgatcatcattcatcaacgggcgatgcctgctcagttcatcaccatcactgctactacatgcgtattttacatcctatttgggataaactttgttctgtgtatatatgtaaataagctattgtcactccgttttatgcctgtacctatatgcatgctgagattatgcaaattgtgaataacaatatagtaagattttttttggagtagaagtatccacgtgttcagaattgcagcaggtaacacttgtcaagatgctctgctgctaacaaaggaagcatggccgttggctgacccgtgcacacaaccaagaccaaacatccagtccaaatgtgtaaaggcaaatggaatctcttttagacaagttcaaataccattcacactaaacttttttctttttctggactcttgatttcaatatgccctcagaaaaaaatcaccaaagaagcacaaacacaatggctcacctgcaattcaccatctgtcttagaaaaatcaactcctaacttgaaaaatcagtcaggattttttttatggaagtaagtgtagaaaaataatttctttaagccattttacattttttaattaaggaggtgccataagttgatataattttaaatgtcgattattttttattcatcccaatattccctctccacttcagtaataaaaagttggtgtgttacatttaatcccttttcttttagtattcattattattggcagacgaagactggaccggtatataccatatagataccatataggcacctcgctgtgaaatgttatcacctatcactgaaaaataaatttgagctcccgtgttaaacttagaacttaaaccgacgaggggatgtccccttagaatccacgcccacgctacgcttgatatttccttttgtgtccattatgcgcatacaagcactggattgttatttcccttgtgtgcgttatatattacgggcgtataaacacttactgagttgtcatgagcgataacaccattgacacgtttgcttattcagattgtggttcatgtggcaagcacgtacgtacaccgccatggaggcactttccaaaagcaacatcccagatgtttctagctgcgtatactagtcgcaattagcaatagagctgtttagtcacgttctggaattgtcagtggttagattaaggatctaataatagaagttgcctaatttgactgccatcctggatggttggagtctttcttggtccacaagacaagcaacagaatcaggattcgtttccagtttggctttggctttgttgtacgttccgttttccttgtactaccgggcacttgcaaattgcttgcgcattactatccttggtgtgaaatggttctaaacggaatattctacttgtagtacgtacacttgtactccacctgtacaagtgacgcatttttttacattgactttgtgcactttgttatattagcctcttttgatattaggcagtagtaccatcctaagaaaaaaaaaactcaatcaacatgtgatgcgtgtaccaacgacacatcacatactttaatttggcgataaaacacatgtgaaccttttattattagtcacaggcagtttgaaaaaaaaaatcacaagaattagtagtactgctacagtactactaaccgatcaacttggagaagaagaaaagatttcctcagagtcgggaaagcccgaggaaagcccatctcccccgtcactgacggtgtggccccaccaccggttcctctcctttcgctcttcctccctatataaaaccctcccaaaaaaaccctctccatttgcaaatcgcaaccatctcgtcaacaaaaaggcgcctctaagaattcctcccaaactttttggtgttgtcaagccgtgcgtttcggggtacatcaacggcggcgatgagctcccggatggccggatcggcgatcctccgtcacgtcggcggcgtccgcctcttcaccgcgtcggcgacctctccggcggcggcggcggcggcggcggcgaggccgttccttgcaggcggagaagccgtccccggggtgtgggggttgcggctgatgtccacgtcgtccgtggcgtcgacggaggcggcggccaaggcggaggccaagaaggcggacgcggagaaggaggtggtggtcaacagctactggggcatcgagcagtcgaagaagctggtgcgggaggacggcacggagtggaagtggtcttgctttagggtacttgcgcttcgctttgctcctgatcggtttcctgtttcgattctgtttgtcccgtagattgatcgccagatcgatgtatccatactccgagatagtaggctcggtccttaacttgtcgcgccgccgtgtgtaattttggtttgattttctccgcagccatgggagacctacaccgcggacacttcgatcgatctgacgaagcaccacgtgcccaagacgctgctcgacaagatcgcctactggaccgtcaagtcgctgcgcttccccactgatatcttcttccaggtataattgtgcttactcgatcaccatgcaccgcccgacggccgtttgattctccgggtgattagcgctgtgtgtttagttcaacgtttttttcgaagggaaaaactgagaggccgcgtgactcttggcgtgtcataagaggcaaagtagcattgcaaccagggcacttgagaattttggtttccttgcttccgggaagatgccatttgtatttaggacgcctgggttctacctgatccacctgtgtgattgattttattttcggaaagtattttctacacctaggtaacatggcacctatgtgtatgcatgcaatttaaaccgttataaaaaaatttacaaacattatacaaacatgtaagtctaaattcgatcaacatatgaagaaacaaaaataataaattttatatgcgctcttcgggtactattcactgtctgattttattatttttgtttctctagttatagatcaaatttagtcatgcatgtttgtgtatagacttatatcatcacaatcgatgttactaatttttttttcaattttttctataactatttgagtcgcatgcaaatgatgggtgtcatagcacttaggtgtagaaaatccctgtccttttattttccgctatactatctgataacaacggctaagaaaaggacacgcattgtgagaaggactcaactttgatttgttaatctcttgcccattaaatcaatcataggcttattactgtttgcactacaatgactggtgatccaattgtttcctagtgcaaattaatctatatatgattctaatgtcttatgactaatttggaagaacaattatattacatgatatccatttctagtagtatgtggaaatgatctctagtcggtcgctaattgctgtaactgtcaatggttaacactgcaaattgggttgggtgcagaggaggtatggctgccgcgcgatgatgctggagacggtggcggcggtgccggggatggtgggcggcatgctgctccacctccggtccctccggcgcttcgagcagagcggcggctggatccgcacgctgctggaagaggccgagaacgagcgcatgcacctgatgaccttcatggaggtggcgaacccaaagtggtacgagcgcgccctcgtcatcaccgtccagggcgtcttcttcaacgcctacttcctgggttacctcctctcccccaagttcgcgcaccgcgtcgtcggctacctcgaggaggaggccatccactcgtacaccgagttcctcaaggacctcgaggccggcaagatcgacaacgtccctgccccggccatcgccatcgactactggcgcctccccgccaacgccacgctcaaggacgtcgtcaccgtcgtgcgcgccgacgaggctcaccaccgcgacgtcaatcacttcgcatcggtacgcatgcatgatcagcgatcttgctctttgatctcgccttttggggatgtatgttgaattggttctgacgtgtgatctggtctggcttgtgatgtgcaggacatccattaccagggcatggagctgaagcagacccctgcgccgatcggatatcactgaggatgtttgtctactgccgaggatttgcatcactaataatcaaatcaaatgagtatacttcgtttttcagggaaagcaaatgagagctctttagctgtatcggatttggtaattgctactagtaactactaagtactgaaaaataaggagtctccttgtttgaagtacaaatctaggagattttttgaaccaactctatctgaattgggcctgtttttcgtacgccgcactgcttcatgtacatatattccatcccctatcttatgtgtggcaagtgtctttctaaattcttggatgtaatgacacctgaatttctttcgttgaactattggcagctgagttatatatactacataccattcttttgttaaagcaggtcagagcatagttttgtccatttgatgtctgtcacaattctggtggtaatgttccaacttcgagaaaattgcatatctaccatcccataagaatggcttcgctagaataccattatgaaaacgggcttcgctggaataccttcctcaaccagagtgtcttcgccaaaatgccatcccggacagaaatgcccctggctcttcttcttcctccatctcgcgcgtgaagagctcgccggcggccatggctagctccctccctgccatggctagctcgccacgggctccggcggagggctgcgcggtggcggcaggcgcggtcgac

SEQ ID NO: 111 - DNA, 6154 bp, Aspergillus nidulans
  CDS (2189)..(2442),(2492)..(2783),(2843)..(3352)
gaattcctggagcgaagtggcggatctggcgagtctcgaaaggctccttcagcacgctaaacccgccgccagcatcgtcatctcctcgctgtactagttatggaggtagtgcagttgttttgaatcttgacacagttgtatctctggaataatatagtagataagcggaatctttggaattgcgtcggaaaggccgggtgctttaagggtaacacctcttacggtctagcggggagatgccaggttcgagtcccaggtaatttttttgccatttttctccataattcatgaccggattagatcccacacctagttagaaatatttgtttttcagaagtcagctgctaaaactcgattgataattttgtgtttctgagcccattcaagtcagcaaatttgccgcccaaaaccttgcaattctcggtggaagtctctgcaatgtgatttagatcacatgtggcgaatgaagtatccaactgtcgaaagcaagagaatattaggaacgagatgttaatcccaaattcaaggttgaggcgggttatatgcagctcgcttgaagccccgcagtgggccctggtcaacctcagcttcaaccgctctagactccttcggatcctacacctaccgaccaggatgacatgttaacactcctctgcttgatcgtcggcgagaatatcacaaaataaacatggcaactcaaagggcatgtttggctgtcagatttattgctacaagcttatacttacgactgttgtcgctgacttttctcagattgcgttcaaagtccatggcaccgttcagggtacgtcttcagttctaactagtttcattcttagccagctatgtttaacaagtacctctacaggtgtgggtttccggtaggcacagtttctacaggtcaacattagacatttctgatcatgtcgttacaccagtgatttcaccatgaagcgtgctgcggaatacggtctcagcggctgggtgaagaacactgattgcggaagggtacgtttgtagtccctattaatgctaacaatcttgcaatgtcttgcatcgctcgtcagagtcactaaatgcatatgaaggtcgaaggcgaagcacaaggctcagaagagggtatccaaaaatttctcaaggatatcaataatggccctcgacttgcacatgtagtcaagctggagaagaagacactcgatccgaaagacggagagagtcattttgggcttaggaagacatcggcgactgtttttgattcactttgatggtcgactatacagtgtatactctggttcaagcagaataaagtccatccgctcggcctcccagtttccatgaaaagtagtctcagcgtagcctcttcatccggtcctctgcttacgtggtagccaatttctgaggggcaagcaggaacgcattgccccagaatctttcagcttcgggaatatttccagtgacgtcgatagggctacgcaaacgtcgttattgaatcccgatttattctcggcgtttgtctgagtcatggcccagttagtggtcccgtcccggcttcgtccgtgatcaagtgacagagagctggatccataataccgtaatctgataacacaggtcaatcttgcatctcagcaagtaggactcccaacagactgaaaaatcaatgggaagtaagtataatctgatttcgcttctgctaaagctaaatatttcaaacacacctgtatatgattgaactatatttgttttatgcccctactcaatgctaaatggagtatccagatttgtaacgctccgtaaggtagggcgccctaaatacatggcgttttgccaggtacgacaagtcaggctcataattagaaatactcaggcactcttcctttacagccaccatctagaatgggcgtcagatctgggtccttctttcggtgaatgaaaagttctgttcggcggcgagcgtgtgactcctgtgtgcgggtactcagccctgagagttccgattcctgcctcagattgcctctggttgaattttttttataggtctttgtatttagttggcatatataaatacaaaaaaagttgcagtcccagtcaactccttatgtatgtcaaagcaacatcttatcttgactaagtacagttcgtcagaattgacagcaccttttcaacaataaacaatatcagcattatgaattcgatgtcaacaacggggcctattagggtggccgctataccgaaacattacctgcaattcacagtgcggacctatacgaggagtatggcgagcgctgggttacgatacagcaatccgcccctcgtcaaaaaatgctacgaccaaccgacagggaaaaggttcatttcctccacgccacaatcacagatcaaagactatttccctcctcctgatgcaccgaaaatagtcgaggtgaaaacagcgtgggctcatcctgtgtaagttatccaatcttcaagagaggcgacagatgctgatcaagaacagctacagtgaagaagaaatgcgtgcagtcactgttggccatcgcgaggcaaagaattggtctgactgggtagcgcttgggagtgtccgcctgctccgatggggtatggacctggtcactggctataaacaccctgcgccgggccaagaagacatcaagaagtttcagatgacggaaaaggaatggttaagaagatttgtcttcttggagagcgtcgcgggtgtacctggaatggttggtggtatgctaaggcatttgaggagtctcagacgtatgaagcgagataacggatgggtatgtcgagatttctttcatctttacttttcgtggctcaactaataatcaatgcgcagatcgagacgctccttgaggaggcatacaatgagcggatgcacttgctcacattcctcaagatggccgaacctgggtggttcatgcgcttaatggtccttggagcgcaaggagtgtttttcaacggcttcttcctctcttatctcatctcgccacgtacctgtcatcgtttcgtcggctatctcgaggaggaagccgtgctcacttacactcgggccatcaaagacctcgaaagcggcaggctgccgcactgggaaaagctggaggctccagagatcgctgtcaagtactggaaaatgcctgagggtaaccggaccatgaaggatctgttgctgtatgtccgagcggacgaggccaaacatcgcgaggtcaaccacacgctagggaacctgaagcaagcggtcgacgtcaaccctttcgccgttgaatggaaggatccgtctaaaccgcatcctggcaaagggatcaaacacttaaagaccaccggctgggaacgagaggaggttgtttgagcatttatgcatttatacattgtggttttgtcattcgcgggagcaaatgggagaacatgcatatatgattaaagcggcgcaaattggttggacttgagcatagcatcgcggatatctcctctccttagtctttattggtaatagaatgttcttgaacctgttcagattaattgatatggaccggccatgcaattatgagcgcagatgaaacatacactaaactatattgggatagcaatatccgtgtggaaaatgggtctttgctgttactgagcgtagccaggggcttgccatcatgtctcagagccagatggctccatccaaagctccgtttatgttcgctaatgcatgtcaagatgtcatcaggtttggtgcagcctgcagacgcgatgcagtgttcatctgcctcttgtgggatgagggaccgacagattgcacggcatatcctgttctgggcgtcaggggcgccgggacgaaacagatcgaaaaagcaaacaatagtcgaatgccgaagaccaggttttctttttcttaaagcatcactctatccatactcagagtaagctatgatcacctggtaggcatggtcgttaggctggcgacgttaaaggtataggcgctactatcgaatagttgacccgcttcccctttagtgccacgaaagaagcccaagaacccccctttcgaacgtctcaagtttgttctcgcctgcagatcggtcacgatcgccattttccgctgttattctaccgaggcgtcccttttctatttacgttaaccgttatttctcctctggtgaccacctgtcctttcatcttttgtgaccgacccgtttatacattatcaagcgtttgctacattccacgcatgaaccgaaacacacagtgtcgcaatggacgatcccgccgcgtttgatgctacagcccctcctgtccgagactcctcaccctccccttccatctctccaacacccgcgatttcgtcctgtccatcaccagaccgtacattttctacagtttcttcgttgtcgacatcgtctggcacatccggtgatgccaggtcttcagtgtcagtttctacgcggagacgggggtatatccggcctcagggggcggaattcgccgcctccgcaaaaaaccgggaaagtgtaatgagcctggggagcatcgcacatttgcaatactatttcgctcgaacaggtctgctggatgggaagggtggtaatgcgcgagaatataagaagaaaaagaggaatacggaggacacaccacaattgctgctcacaccaaatgcccgcttcacggacgaaattacaatgagcccaacggaggatatgaatacggattcaggagaagatgcgtttgacgttgtcgaggacggagacgaagtgatgctgcccccgactgtcagtacctatagcattaagacgcaccatatcccgccgcctccggatctgctgcagctacggagggaccttttgaacgcgatatataaagcacagagagagattgatgcggtgtctcagcagcagcattcaccggagacgcttccaccacgaatcgatgtctcgccagatggcgatacggaaccaaatggagattcgcaacaccaggcgaatctggctgcagctcttcagagctgggatgaaatcaacggtatgcgcttattagatgttgtcacgcttgcgattcgcgcagcaaagatatactataccacccatgaatacccggaacgactggcttctataaaaagcgagcgtgagattaggcaagatctatttaatgtccttgaagtgttgaagcgatgggcaggacgcaattttgcaggtgggtttcgagaagaggaaaagaaggccgttctaggctggatgtccgatgtgcgcgatatgttgtcgcaagaggcgcagcttgaagacgcagaagtgaaagagcgggcatcgtgggtctggattgaaggcgattggactggtcgggaacggcagcgggaagaggaatttctggccagccttgacaggtccagactcacgcttgccagtatggacagagcctgaagatggttcactcccatctgcgatgcttgagagactacgtgacggccgcgatctgatccggatccacaacatagccgtccggaagtccaagcgaccttttggtgagatcaaaaccttccatgaagacgttgccaagccatatcgacaagcagataatcttcggtattggataaaggcggccgaactgcgctgggagacgaagctcgaactggacgtcatgggcgtcgtctatggcaccagcgacgaggcgtggcaccagtttgatcgagccattgcagcctggtgcaagtccgtccgagaagagctctcgcaagaccttcgagtattgagaagacgagcgactgcagccagtgttgacgggctgcttgtcaagatctcatgacggcttccgtcgataatccacctctttgagagcgcatgtcttggatgtctgggcttttgggaaagtggccattgggtccacgtagtttgattcaggatgacgtttgtttgcagtccgcgctgcctgtatttgataccccttacttgtcgatgacagttttggcgagggagtttggtgtttgtcctgcaccttgtacattgtgctgcattgcattagtcaatgattagccagattaaatatttaaagtatatccatgatttcctagtcgtatcccgaaccacaaattcggttagaaattcggcagtattacaacgagcagcgcgttcagggaggagttccttggaaatggaatgcctaggcctacggtacc

SEQ ID NO: 112 - DNA, 3926 bp, Saccharomyces cerevisiae
  CDS (1017)..(3518)
ttcatacttacgataaaatcacttggaatagaatctacaccaatgaacgcgttttctaagatttccctgaggggtgattaaccaaattgaaaaagatatcgtcaaattcttctttgtgtattttaaagaaggtttttgtattagaaaacgtgcgaaacaaatctttattgatttctgaaaacaatggcaatcgaagctcataggaaccacttttctgtgccttttgaaagatattctcaattatctcgattagctttggcaaatctttaccatatataaagtctccactgatgggtttgtcaatgtggccccatgcgtactcaaaaatagcatcaaacgcaccgttactcatacttacgttgtcaaagacagaattgtttgtaaagctttctttcttaaccttggagccgccaaaaaaatactccactaaggccagtagcaacaacacgttttcttggatgatgcgttttcttgaacaaacagtaccgactaggactgtttcaatgaagttgtgtacggtctggtagtatatctatattccgtgatgcctttgtggaggacgttgagatgagactgagtcgtacaccatgttattcctgtttatggttaattgcgcgtcgcgctttctctagcaaatatctcggttcgaagtaaagcaggtccttcatgtaatggtaacctaaggcaaagggtttgtcatatacccgtgaaggcatttacacaagcgcacttctagtcatatgcagttcatgcatattaagtgagtgttataacgcaagagttatatttgaaatagggttgttaaagaagggagaaacccattcaccacattatctttgcgagtgtaaaactagataacttaaatttttaggagagattttgccacttggcagcaaataccaaatagcagtactgttccggtagataaaggcaaagagttagaggtgtgctttacgaacagcgctggaagggaaaggaaacaaaaaagacaaaaagacagctgtattgttggcgccatgaataatgctgcaaatacagggacgaccaatgagtcaaacgtgagcgatgctccccgtattgagcctttaccaagcttgaatgatgatgacattgaaaaaatcttacaaccgaacgatatctttacgaccgatcgtaccgatgcaagtactacatcttccacagccattgaagatattattaacccctcattggatccgcagtcagcagcatcgccggttccttcttcctcttttttccatgactcaaggaaaccttccaccagtacacatttagtaaggagaggtactccattgggaatttaccaaaccaatctatacggtcacaatagcagagaaaatactaatcctaatagtacattattatcttctaagttactcgcgcatccaccagttccttatgggcaaaatcccgatttactacaacatgctgtgtacagggcacagccgtcaagtggaaccactaacgcgcaaccgcgccaaaccacaagaagatatcaatcccataaatcacggcctgcatttgttaataaactatggagcatgttaaacgatgattctaatacgaaacttatacagtgggcggaggatggaaaatcttttattgtcacgaatagggaggaatttgtgcaccaaattttaccaaaatattttaaacattccaatttcgcttcctttgtaagacaattgaacatgtatggatggcataaagttcaagatgtcaagtcaggatcaattcaaagtagttcagatgataagtggcaatttgaaaatgaaaacttcattagaggtagagaagatttgctggaaaaaataatcaggcagaaaggttcctccaataaccataatagccctagtggtaacggtaatccagcgaatggtagcaacatccctctggacaatgccgcaggaagtaataatagcaataataacatcagtagtagtaattcattttttaacaatggtcatttattgcagggtaaaacactaagattaatgaacgaagcgaatcttggagataagaatgatgtcaccgcgattttgggggaattagagcaaataaaatataaccagattgcaatttccaaagatttactaagaataaacaaagataatgagttattatggcaagagaatatgatggccagggaaagacatagaacccaacagcaagccttggaaaaaatgttcagattcttgacatctatagtcccacacttagatcccaaaatgattatggacgggctgggagatccgaaagttaataatgaaaagctaaacagtgcgaataacattgggttaaatcgcgacaacacaggcactatagatgaactaaaatccaacgattctttcataaacgatgatcgtaattctttcaccaatgctacaaccaacgcccgtaataacatgagtcccaacaatgatgacaatagtattgacaccgctagcactaataccaccaacagaaagaaaaatatagatgaaaacatcaaaaataacaacgacataattaatgacattatatttaataccaaccttgccaacaatctcagcaattacaatttcaacaataatgctggctcgccaataaggccctataaacaaagatatcttttgaaaaatagagccaattcctcgacatcgagtgagaatccaagcctaacgcctttgatatcgaatctaataatgaccgcaaaatttcagaaattccttttgatgacgaagaagaagaagaaaccggattttaggccttttacctcgcgagatcctaataaccaaacgagtgaaaacacttttgatccaaacagatttacgatgctctctgatgatgatttaaaaaaagattctcataccaatgacaataaacacaacgaaagtgatcttttttgggacaacgtacatagaaatatagacgaacaagatgcaagactccagaacttggaaaatatggttcacatactttctcctggatatcctaataagtcgttcaacaacaaaacttcctcgacaaacactaattccaatatggaaagtgctgtcaacgttaatagccctggtttcaacttacaggattatttaactggagagtctaattcccccaattctgttcattctgttccctccaatggcagcggctccacaccgttgcccatgccaaatgataatgacaccgagcacgcaagtacaagtgtcaatcaaggcgaaaatggaagcggattaacgcccttcctcacggtagatgatcacacactaaacgacaataacactagtgagggaagtacaagggtgtcccccgatataaagttcagcgccactgaaaacactaaagtgagtgataacctgccaagctttaatgaccacagttattccacccaggccgacacggcgcccgagaacgctaagaaaagatttgtggaggaaataccggaaccggctatagtcgaaatacaggacccgacagagtacaacgatcaccgcctgcccaaacgagttaagaaatagtacacaggacgaggtcattaaatagcgtatataatcatttaatatagtatgttctcgaagctgatcgcgtaaggcgcagaacgaactaaaaaaaataccggcacccatgcacctcacaccgccgcacgcgagtgaggttgaactgcacccggaaaatgccaagtagatgagtcgtgaagagttctcgttattcgagctagtgagagcctgagaagggcttgccgagtgaactggggtcacattggccgttttaacgcaagttggcgtacttatgttgactgttggatgaaagggtaatcaagagaaacggaaacggcctcctcatcgtaaagctcatcagtattcatttctcccctttctgctccatcgcgtgctcgagactatactcttcagattatcaagcagaaa

SEQ ID NO: 113 - DNA, 3942 bp, Zea mays
  CDS (436)..(1773),(1878)..(2159),(2281)..(2621),(2711)..(2990),(3079)..(3276),(3371)..(3670)
  unsure (1)..(3942): unsure at all n locations
gtgggcccatggcacagacggcttacagagatcctaccccacattccagagatatggaacgccaccatggccgataccgaacagccgcgccatgtgtcacacatcgggagcacttcgtcaacaatccaacggtccatgattattaaggcccacatgtcatagaaccctctggcaccctctcgccgcttcgtcacctgtcccgtcgctcgtcctctcgtttccacggccttctagactcccggcgaacactcccctccgccttcttatgctcatcccctccgcttccgaagcacaacatttcaaccagaaacactagccgaagcaaatccattccacaagcacctggtgggatcatctcatcatcagaaaccaagagagagattccgtgtccgcttgttgtagtagattgtgaggactgaggaccgagaagcagccatgaatccggacaacttcacccacaagacgaacgaggcgatcgtgggggcgcacgagattgcggtggaggccggccacgcgcagctcacgccgctgcacctggccgcagtgctggctgcggacaagggcggcatcctgcggcaggccatcacgggggcgtcggggggcgacggagcggccggggactcgttcgagcgcgtgctgaacaactcgctcaagaagctgccgtcgcagtccccgccgccggactccgttccggcgtctacggcgctgatcaaggtcatccgccgggcgcagtccgcgcagaagaaacgcggggactcgcacctcgccgtcgaccagctgctgctcggcctgctcgaggactcgcagatctccgactgcctcaaggaggccggcgtgtccgcggcgcgggtgcgcgccgagcttgagaagctccgcggcggggaggggcgccgcgtggagtccgcgtcgggggataccaacttccaggcgctcaagacatacggccgggacctcgtcgagcaggccgggaagcttgaccccgtcatcggccgcgacgaggagatccgccgcgtcgtgcgcattctctcgcgccgcaccaagaataaccccgtcctcatcggcgagcccggcgttggcaagacggccgtcgtggagggcctcgcgcagcgcatcgttcgcggcgacgtgcccagtaacctcctcgacgtccgcctcatcgcgctcgacatgggcgcgctcgtcgcgggcgccaagtaccgcggcgagttcgaggagcggctcaaggccgtgctcaaggaggtggaagaggccgaggggaaggtcattctcttcatcgacgagatacacctcgtcctgggcgcgggcaggacggagggttccatggacgcggccaacctgttcaagccaatgctggcgaggggacagctcaggtgcatcggcgccaccacgctggaggagtaccgcaagtacgtggagaaggacgcagcgttcgagcggcggttccagcaggtgttcgtcgcggagccgagcgtgcccgacaccgtcagcattctgaggggcctcaaggagaagtacgaggggcaccatggcgtgaggatccaggaccgcgccctcgtggtcgcggcacagctctccgcgaggtacatcatgggtcggcacctgcctgacaaagccatagacctggtggacgaggcctgcgccaatgtgagggtgcagctcgacagccagccggaagagattgataacctggagaggaagagaatccagcttgaggttgagctccacgcgctcgagaaggagaaggacaaggccagcaaagcccggctgattgaggtgcgtgtctcgagcactgaattttcctcaaacaagtcctcttgtctgatgttcctgttttgaacttttgatactaacgtcgcttaactgtggccattgttcaggtcaggaaggaattggacgatctgagggacaagctgcagcccctgaccatgaagtacaggaaggagaaggagagaattgatgagatcaggaagctgaagcagcgccgcgaggagctccagttcaccctgcaggaggccgagcgccggatggacctggcccgtgtggccgacctcaagtacggcgccctccaggaaatcgacgctgctatctccaagctggagagcgaaacaggggagaacctgatgctcaccgaaaccgtcggccctgaacaaattgcagaggtatgttattattcttgttcaccgtcacaaaaattttgcagagcaagtgccgaatttgccgatcgtctcctagtagagtagtcgtgcagcgtgctgaaatggtgtttcgtcctatgggcaggtggtgagccgttggacgggtattccagtgacccggcttggccagaacgacaaggagaggctggttggcctggctgacaggcttcaccagagggtggtcggccagacagaggctgtgagcgccgtcgcagaggcggtgctgaggtcgagggccggtcttggcaggccacaacagcccactggctcgttcctcttcctgggtccgactggcgtggggaaaactgagctggccaaggccctagccgaacagctgttcgacgacgagaaccttcttgtccgcatcgacatgtcggagtacatggagcagcactcggttgcccgcctcatcggagcaccacctgggtaagtagcagaaaatgcatgcatcttcgtatttttaactgcgaattgcgatgaactcttgttctgacagtgggccggacctgtgacagctacgtcggccatgaagagggtgggcagctgactgaacaagtgaggaggaggccgtacagcgtgatcctgttcgacgaggtcgagaaggcccatgtcgccgtgttcaacaccctgctccaggtcctcgacgacggcaggctgacggatgggcaaggcaggacggtggacttcaggaacaccgtgatcatcatgacatcgaacctcggcgccgagcacctcctcgctgggatggtgggcaagaactccatgaaggtcgctcgcgatctggtcatgcaggaggtatgcattgcgataacgttctgaatcgtcgttagacattgttcctctgcagcgtgatgctcaatcggatcgttattgctgtgtgcaggtgaggaggcacttccgccctgagctgctgaaccgtctcgacgagatcgtgatcttcgatcctctgtcccacgagcagctgaggaaggtcgctcgccttcagatgaaggatgtggccgtccgtcttgccgaaaggggcatcgctctggctgtgaccgacgccgcattggacatcatcttgtctctctcttacgatccggtatgtgaccatccatgatttgatccatctgaattcgtcggtgacacctgatggtgctgactctcttatctttcttgtgtggcttcaacaacaggtgtatggcgcgcggccaatcaggaggtggatcgagaagagggtggtgacgcagctgtcgaagatgctgatccaggaggagatcgacgagaactgcacggtctacatcgacgccgcgcccggcaaggacgagctggtctacagggtggaccggagcggcggtctggtgaacgctgagacggggatgaagtcggacatcctgatccaggtccccaacagctccaccaggagcgacgctgcgcaggccgtcaagaagatgaggatcatggaggaggacgaggacggcatggacgaggagtaaaaggcgggccggaggacgcggagctgcgcccaggccgcangtctggcgccggcatcatcgagtgtcttttgaataagcgtgtagataagcccgtgaatatgcagacgaggttgagatgatgttcttgtaacgctgctgtttgtcaagcatggacggatggtctctcatatggtatcaaagtgacgaaggtctctcaatcgatgtcttgtcattatttttatctccctaaatgtttttacatgttttcctctattcattgcatcctttatgca

SEQ ID NO: 114 - DNA, 3301 bp, Saccharomyces cerevisiae
  CDS (334)..(3060)
tttctttcgttgttcttgtagatatatatttttccagaattttctagaagggttattaattacaatcttaaacgttccataaggggccgcgatttttttgttcaattttcaacagggggcccatctcaaagaactgcaaattatatcacagtaaaaggcaaaggggcgcaaacttatgcaacctgccagattattatataaggcattgtaatcttgcctcaattccttcataattcgttcctttgtcacttgttcctttttacccttgaatcgaatcagcaataacaaagaaaaaagaaatcaactacacgtaccataaaatatacagaatatatgaacgaccaaacgcaatttacagaaagggctctaacgattttgacgttggctcaaaaattggcttcggatcatcaacatccacaattacaacctatacatattctagctgccttcattgaaacgccagaagatggatcagtcccttacctacagaatctaattgagaagggccgttacgactatgatcttttcaagaaagtggttaatagaaatctagtaagaattcctcaacagcaacctgcacctgcggagataactccaagttatgctttggggaaagtccttcaagacgctgctaagattcaaaaacaacagaaggactcatttatagcgcaagaccatatattgtttgctctattcaatgattcgtctattcagcaaatatttaaggaagctcaagtagatattgaggccatcaagcaacaagctcttgaacttcgtggtaacactagaattgactctcgtggcgctgatacgaacacacctttggaatatttatcaaagtacgccattgatatgactgagcaggctcgtcaaggtaaacttgaccctgtcatcggccgtgaagaagaaataagaagcactattagagttttagcaagaagaattaagtccaacccatgtttaattggtgagccaggtatcggtaagaccgctattattgaaggtgttgctcaaagaatcattgacgatgacgttcccactatcttacaaggcgctaaattgttcagtctagatttggccgcattaaccgcaggtgctaaatacaaaggtgatttcgaagaaagattcaaaggtgttttgaaggaaatcgaagaatcaaagactctaattgtgttattcattgatgaaattcacatgttaatgggtaatggtaaggacgacgctgctaacatcttgaagccagctttgtccagaggccaattgaaggtcatcggtgccaccaccaataacgaatatagatctattgtggaaaaggatggtgcctttgaaagaagattccagaaaattgaagtcgctgaaccaagtgtgagacaaacagtggccatattgagaggtctgcaaccaaagtatgaaatacatcatggtgtaaggattctggatagcgccttagtcactgctgctcaattagccaagcgttacttgccatatagaagattgccagattctgctttggatttagttgatatttcttgtgctggtgtcgccgtcgcaagagattctaagccagaagaattggattccaaggaacgtcaattgcaattgattcaagtagagataaaagctctagagagagatgaagatgccgactccaccactaaagatagattaaagttagctaggcagaaggaagcttcattgcaagaagaattggaacctctaagacaacgttacaatgaagaaaagcatggccatgaagaattgacacaagctaaaaagaaattggatgaactggaaaacaaggcccttgatgctgaacgtagatatgatactgctaccgccgctgatttaaggtacttcgccatcccagatatcaaaaagcaaatcgaaaagcttgaagatcaggttgctgaggaagagagacgtgctggtgccaactccatgatccaaaatgtggtcgattcagacaccatttctgaaacagctgcaagattgactggtatccctgttaagaagttgtcagaatctgaaaatgaaaaattgattcatatggaacgtgacttatcatctgaagtcgtgggccaaatggatgccattaaagctgtttccaatgccgttagattgtctagatcaggtttagctaatccaaggcaaccagcatccttcttatttttaggtttgtccggttccggtaaaactgaattggctaaaaaagttgctggatttttgtttaatgatgaggacatgatgatcagggtcgattgttctgaattaagcgagaagtatgcggtctctaagttgttgggtaccacggcaggttatgtcgggtacgatgaaggtggctttttaactaaccaactgcaatacaaaccatactccgttttgttattcgatgaagtagaaaaggcacatcctgatgttttgactgtcatgctacaaatgttggatgacggtagaattacttctggtcaaggtaagacgatcgactgttccaattgtattgtcatcatgacttccaatctaggtgctgaatttatcaattctcaacaaggatcaaagatccaagaatctaccaagaatttggtcatgggtgctgttaggcaacatttcagaccagaatttttgaacagaatttctagtatagtcattttcaacaagctatctagaaaagctattcataagatcgtggatattcgtttgaaggaaattgaagagagattcgagcaaaatgataaacattacaagttgaatttaactcaagaggccaaggacttcttggccaaatatggttattccgatgatatgggtgcacgtccactgaacaggttaattcaaaacgaaattttgaacaaactggcactaaggatcttaaagaatgaaatcaaggataaggaaactgtcaatgtcgtcttgaagaagggtaaatctcgtgatgaaaatgttcctgaggaagctgaagaatgtctggaagttctaccaaatcacgaagctactataggggctgacacgttaggtgatgacgataatgaggacagtatggaaattgatgatgacctagattaatttaatatagtgtgatttttaaaaactttcgaacaagaatcagtaatataatatatataattaataaaactaatggaatttgtttaattgaacttgacacccgagcaaaagagctcacattttaacgtttagttcatcttgctgtgaataatctaaaagtaaacaatggacaaaaaagttccactggacgtcaaatctttttttattgtatttgggacatatggcgttgataactaaagtt

SEQ ID NO: 115 - DNA, 4248 bp, Escherichia coli
  CDS (557)..(3130)
agatgactgccgactgcctccctgtgctgtttttgcaatcgacgggaacgaagtcgccgccgctcatgctggctggcgtggactgtgcgcaggcgtgctggaagagacggtttcctgttttgctgataatccggaaaatattctcgcctggttagggccggcaattggtccacgcgcgttcgaagtggggggggaggttcgcgaggcgtttatggcagtagacgctaaagcaagtgcagctttcattcagcatggtgataagtatctggcggatatttatcagcttgcccggcagcgtctggcgaacgtgggtgttgagcaaattttcggcggcgaccgttgtacatatacggaaaatgagactttcttctcttatcgtcgcgacaagaccaccggtcgtatggcaagtttcatttggctgatataacctaaagaatcaagacgatccggtacgcgtgattttcttttcacattaatctggtcaataaccttgaataattgagggatgacctcatttaatctccagtagcaactttgatccgttatgggaggagttatgcgtctggatcgtcttactaataaattccagcttgctcttgccgatgcccaatcacttgcactcgggcacgacaaccaatttatcgaaccacttcatttaatgagcgccctgctgaatcaggaagggggttcggttagtcctttattaacatccgctggcataaatgctggccagttgcgcacagatatcaatcaggcattaaatcgtttaccgcaggttgaaggtactggtggtgatgtccagccatcacaggatctggtgcgcgttcttaatctttgcgacaacgtggcgcaaaaacgtggtgataactttatctcgtcagaactgttcgttctggcggcacttgagtctcgcggcaccgtggccgacatcctgaaagcagcaggggcgaccaccgccaacattactcaagcgattgaacaaatgcgtggaggtgaaagcgtgaacgatcaaggtgctgaagaccaacgtcaggctttgaaaaaatataccatcgaccttaccgaacgagccgaacagggcaaactcgatccggtgattggtcgtgatgaagaaattcgccgtaccattcaggtgctgcaacgtcgtactaaaaataacccggtactgattggtgaacccggcgtcggtaaaactgccatcgttgaaggtctggcgcagcgtattatcaacggcgaagtgccggaagggttgaaaggccgccgggtactggcgctggatatgggcgcgctggtggctggggcgaaatatcgcggtgagtttgaagaacgtttaaaaggcgtgcttaacgatcttgccaaacaggaaggcaacgtcatcctatttatcgacgaattacataccatggtcggcgcgggtaaagccgatggcgcaatggacgccggaaacatgctgaaaccggcgctggcgcgtggtgaattgcactgcgtaggtgccacgacgcttgacgaatatcgccagtacattgaaaaagatgctgcgctggaacgtcgtttccagaaagtgtttgttgccgagccttctgttgaagataccattgcgattctgcgtggcctgaaagaacgttacgaattgcaccaccatgtgcaaattactgacccggcaattgttgcagcggcgacgttgtctcatcgctacattgctgaccgtcagctgccggataaagccatcgacctgatcgatgaagcagcatccagcattcgtatgcagattgactcaaaaccagaagaactcgaccgactcgatcgtcgtatcatccagctcaaactggaacaacaggcgttaatgaaagagtctgatgaagccagtaaaaaacgtctggatatgctcaacgaagaactgagcgacaaagaacgtcagtactccgagttagaagaagagtggaaagcagagaaggcatcgctttctggtacgcagaccattaaagcggaactggaacaggcgaaaatcgctattgaacaggctcgccgtgtgggggacctggcgcggatgtctgaactgcaatacggcaaaatcccggaactggaaaagcaactggaagccgcaacgcagctcgaaggcaaaactatgcgtctgttgcgtaataaagtgaccgacgccgaaattgctgaagtgctggcgcgttggacggggattccggtttctcgcatgatggaaagcgagcgcgaaaaactgctgcgtatggagcaagaactgcaccatcgcgtaattggtcagaacgaagcggttgatgcggtatctaacgctattcgtcgtagccgtgcggggctggcggatccaaatcgcccgattggttcattcctgttcctcggcccaactggtgtggggaaaacagagctttgtaaggcgctggcgaactttatgtttgatagcgacgaggcgatggtccgtatcgatatgtccgagtttatggagaaacactcggtgtctcgtttggttggtgcgcctccgggatatgtcggttatgaagaaggtggctacctgaccgaagcggtgcgtcgtcgtccgtattccgtcatcctgctggatgaagtggaaaaagcgcatccggatgtcttcaacattctgttgcaggtactggatgatgggcgtctgactgacgggcaagggagaacggtcgacttccgtaatacggtcgtcattatgacctctaacctcggttccgatctgattcaggaacgcttcggtgaactggattatgcgcacatgaaagagctggtgctcggtgtggtaagccataacttccgtccggaattcattaaccgtatcgatgaagtggtggtcttccatccgctgggtgaacagcacattgcctcgattgcgcagattcagttgaaacgtctgtacaaacgtctggaagaacgtggttatgaaatccacatttctgacgaggcgctgaaactgctgagcgagaacggttacgatccggtctatggtgcacgtcctctgaaacgtgcaattcagcagcagatcgaaaacccgctggcacagcaaatactgtctggtgaattggttccgggtaaagtgattcgcctggaagttaatgaagaccggattgtcgccgtccagtaaatgataaaacgagcccttcggggctcgtttttgtctataagttagacggaaaagactatatttaagatgttttgcctgaaaagtgagcgaacgataaagtttttatatttttcgcttgtcaggccggaataactccctataatgcgccaccactgacacggaacaacggcaaacacgccgccgggtcggcggggttctcctgagaatctcaacagagaaaagcaaagaaatgcttgactctgtagcgggaaggcgtattatgcacaccgccgcgccgctgagaaaaagcgaagcggcactgctctttaacaatttatcagacaatctgtgtgggcactcgaagatacggattcttaacgtcgcaagacgaaaaatgaataccaagtctcaagagtgaacacgtaattcattacgaagtttaattctttgagcatcaaacttttaaattgaagagtttgatcatggctcagattgaacgctggcggcaggcctaacacatgcaagtcgaacggtaacaggaagcagcttgctcttcgctgacgagtggcggacgggtgagtaatgtctgggaagctgcctgatggagggggataactactggaaacggtagctaataccgcataatgtcgcaagaccaaagagggggaccttcgggcctcttgccatcggatgtgcccagatgggattagcttgttggtggggtaacggctcacctaggcgacgatccctagctggtctgagaggatgaccagccacactggaactgagacacggtccagactcctacgggaggcagcagtggggaatattgcacaatgggcgcaagcctgatgcagccatgccgcgtgtatgaagaaggccttcgggttgtaaagtactttcagcggggaggaagggagtaaagttaatacctttgctcattgacgttacccgcagaagaagcaccggctaactccgtgccagcagccgcggtaatacggagggtgcaagcgttaatcggaattactgggcgtaaagcgcacgcaggcggtttgttaagtcagatgtgaaatccccgggctcaacctgggaactgcatctgatactggcaagcttgagtctcgtagaggggggtagaa

SEQ ID NO: 116 - DNA, 3180 bp, Synechocystis PCC6803
  CDS (316)..(2931)
acttctaggacgtagccctcattccaagtcatggcgtctgattctgcgtaggggtcaagattagcccttagcttacaagaaaggggctttggggcctagttgaatggcacaaattttccttccctgactgtttttgcgccattgtctagctcaaagtcagcctccggcatcctctagaaagacttccatcccctggttgagcaagggtaaaccccaccactgcattgggaaaaccctccttcctagctccggattccaccccctaaaattgatttggtagtccttacacacccaatagccaatatagaaaattttatgcaacccacagatcctaataaatttacggagaaagcttgggaggcgatcgccaaaacaccggagattgctaaacagcatcgacaacagcaaattgagacggaacacctactcagtgccctactagaacaaaatggtctggccaccagcatctttaataaggctggggcgagcattccccgagttaacgatcaagttaatagctttattgcccaacagccaaaattaagtaatccgagtgaatcgatttatttaggccgcagtctcgataaattgttggacaatgcggaaatagccaagtctaaatatggagacgactatatttccatcgagcacttgatggcggcttacggccaagatgaccgcctgggcaaaaacttatatcgagaaattggcctaacagaaaataagttggcagaaattatcaagcaaattagaggaacccaaaaagtgaccgatcaaaatccagagggcaaatacgaatcccttgaaaaatatgggcgagatttaacggaattagcccgggaaggtaaactagatcctgtcattggccgggatgaagaagtgcggcgcaccattcagatcctttcccgccgcacaaaaaataaccctgtgttaattggggaaccgggggttggtaaaacggcgatcgccgaaggtttagcccaaagaattattaaccatgacgtaccggaatcattgcgggatcgcaaactaatttccctcgatatgggggcgttaattgccggggcaaaataccggggggaatttgaagaaagacttaaagcggtacttaaagaagttaccgacagccaggggcaaattattctctttattgacgaaattcataccgttgtcggcgctggggccacccaaggagccatggatgcgggcaacttattgaaacccatgttagcccggggtgctttgcgttgtatcggggccaccactttagatgaatatcgcaaatatatcgaaaaagatgcggctttggaacgacgtttccaggaagttttagtggatgaacccaatgtattagataccatttccattctccggggattaaaagaacgctatgaagtacaccacggcgtaaaaattgccgatagtgccctggtagcggcggccatgttgtccaatcgttacatcagtgatcgttttctgccggataaagctattgatttagtagacgaagcagcggccaaattaaaaatggaaatcacctccaaaccagaggaattagatgaagttgaccggaaaattctccaactagaaatggagcgtttatctttacaacgggaaaatgattctgcttccaaggagcggctagaaaaattggagaaagagttggctgattttaaagaagaacagtctaaacttaatggccaatggcagtcggaaaaaacggttattgatcaaattcgtactgttaaggaaaccatcgaccaggtgaacctagaaattcaacaggcccaacgggattacgactacaataaagcagcggagttacagtatggcaaattaactgatttacagcggcaagtggaagctttggaaacccaattggcggagcaacaaacctctggcaaatccctcttacgggaagaagttttagagtctgacattgctgaaattatctcgaaatggaccggcattcccatcagtaaattggtggaatcggaaaaagaaaaactgctccacttggaagatgaactacacagccgagtgattggtcaggatgaagcggtaaccgccgtagccgaagccattcaacgctcccgagctggtctttccgatcctaatcgtcccaccgctagctttatttttctgggccccacaggggtcgggaaaactgagttagcgaaggctttggcgaaaaatttattcgacacggaagaagccctggtgcggattgatatgtctgaatatatggaaaaacacgctgtttcccgtttaatgggggcccctccgggctatgtgggctatgaagaagggggacaattgacggaagcaattcgccgccggccctattcggtcattctttttgacgagattgaaaaagcccatggggatgtgtttaacgtcatgctccaaatcctggatgatggccgtttaaccgatgcccaaggccatgtggtggacttcaaaaatacgattatcattatgaccagtaacctgggctcccaatacattttggatgtggcgggggatgatagtcgttatgaagaaatgcggagccgagttatggatgtaatgcgggaaaacttccgcccagaatttctcaatcgggtggatgaaacgattattttccatggcttacaaaaatccgagttacgatccattgtccaaattcaaattcagtctttggctacccgtttggaggaacaaaaattaactttgaagttaacggataaagccctagattttctggctgccgtgggctatgaccccgtttatggggcccgacctttaaaacgagccgtccaaaaatacctagaaacggcgatcgccaagggaattttacggggggattacaaacctggtgagaccattgtggtggatgaaaccgacgaacgcctcagttttaccagtttaaggggggatttagtcatcgtttagggacttctgttccgtcaactctgacggattaataactccatcaatgctaaccctaggggattccaactccgccgtcatggttgcccctggggtttggtgatggggtaataactcctgaccccggttaatcaaagccgccatgcccttgtcataattgctggcgatcgccaaaaaagcaccggccataacgtaaataggcaggggcaaaattaccccccatagccattggaaaagttgcactccggc

SEQ ID NO: 117 - DNA, 3000 bp, Xylella fastidiosa
  CDS (187)..(2769)
tgttggcgtgtgggctgtttcatcagttttgtgtatttggggtaggttgtgtatctctgttcgatcgggtgttctcaaatgaacacatacttggtcatcggtcgtgtccttgaaagtgacttgttaaaccgcatctgttggatgtcgccggcagatgtccggtctctttcctaactggggctttttatgcggatggataagcttacttcgcgtttccagaatgcgttggctgatgcgcaatcgctggccgtcggtcgtgaccatactattattgagccggtgcatgttttttcggcattgcttgatcagcagggggggagtacacgtccgttgctcatgcaggccggtgtcaatgtgccattgctgcgtgagcggttgaccgagatacttgaggcattgccgaaagtgagtggtcagacggttaatgtctcacccagcaatgaattgagtcgtttgtttcatcggactgataagttagcgcagcagcatggcgatcagtttatggccagtgagtggttcgtgttggctgtggtcgatgatagtggggggctgggccaggcgttgcgtgctgctggtgcggaaaaaaagaagattgaggctgcgattgataaattgcgtggcggtgaaactgtccagactgagaatgcggaggagcagcgtcaagcgttggaaaagtacacgattgatctgactgccagggctgagagtggcaagcttgatccggtgattggtcgcgatgaggaaattcgccgcacgatacaggtattgcagcggcgtacaaaaaataatcctgtgctgattggtgagccgggtgtgggtaaaactgccattgtagaagggctggctcagcgcattgtcaatggtgaggttccggaagggttgcgcagtaagcgtctgctctcgctggatttgggagcgttgattgctggggccaagtttcgtggtgagtttgaggagcgcttgaagggggtgcttaacgatctcgctaagaatgaggggcgggtcattttgttcattgacgagctgcataccatggttggtgccggtaaagccgatggtgcgatggatgctggcaatatgctcaagccggcgttagcacgtggtgagttgcattgtatcggtgcgactacgttggatgagtatcgcaagtacattgagaaggatgcggcgttggaacgccgtttccagaaggtgtttgttggggagccgacggtggaggataccatcgcaattcttcgtggacttaaggaaaagtatgcgttgcaccacggtgtggaaatcactgatccggctattgttgctgcggctacgctgtctaatcgctacatcactgatcgtcagttaccagataaagcgattgacttgatggatgaggctgccagtcgtattcgtatggaaattgactccaagccggaagagcttgatcgtttggagcgtcggttgattcagttgaaaattcagcgtgagatgctgaagaaagaaaaggatgaggcgagcaagcagcgtttagccgatcttgagcgtgatattgaggttctggaccgtgaattttccgatctggaggaggtgtggagatcagaaaaagccgcgctacagggggcgactaagatcaaggagtcgatcgagcaggccaagcttgatttggaagccgcgcagcgccgtcaggactacgccaagatgagcgagattcagtatggtgtactccccgcgttggagaagcagctggtggcagcaagtcaggcggaacagcacgattttacgttggtgcaggagaaagtgactgctgaggagattgccgaggtagtcagtcgttggactggtattccagtgagcaagatgcttgagggcgagcgcgataagttgttgcgtatggaagctgatctaggccgacgtgtggttggtcaagaggaggcgatcaaggtggtatcggatgcggtacgccgttcgcgtactggtttgtctgatccaaatcgaccgagcggctcgttcctttttctgggtccgacgggtgttggtaagactgagttatgtaaggcgctggctgaatttttgttcgacagtcaagatgcaatggtccgcattgatatgagtgagttcatggaaaagcattctgtggcgcgcctgattggtgcgcctccgggctatgtgggttatgaggaaggaggttatcttactgaattggtgcgacgtcggccttactctctgattcttttggatgaagtggagaaggcgcatagtgatgtgttcaatattctgctgcaagtacttgatgatggacgcttgactgatggtcagggccgtactgttgattttcgcaataccgttattgtgatgacatcgaacttgggttcacatcagatccaagaactcagtggagacgattctccggaggtgtatacgcaaatgaaggcggcagtgatggaggtggtgcaggcgcattttcgcccagagttcattaacaggttggatgatattgttgttttccacccgttggacaaggcgcaaatcaagcagattgcgcggattcaactgcaggggcttgagaagcgtctcgctgaatctgagttgaaactagatttggatgatcgtgcgttggaattgcttggtaatgtcggatttgatcctgtatatggtgcccgcccgctgaagagagcgatccaatctcagctggagaatcccttagcgcagcagatcttagctgaagcgttcgtcagtggagatactgtgcaggtgggtgttgatggagggaagcttgtattcgctaaggtgtgaagttgtttactgtatatagtcagtagtgctgtgtattgtatgggtgtacgaggggtgtggttataaataacctttcttggttgccagtagtgttggtttatattgatcaggttgggtccgcgcgcatcgtgcgcggacagatgtaaggtctgtatggaaagccaaattaatttggctggatgctaagaaatggacgaaggaggagatcaattgcgacagtcattgagt

SEQ ID NO: 118 - DNA, 1595 bp, Glycine max
  CDS (23)..(1114)
attcggctcgagtgcgattgcgatggtgaaatcgaacgagaacggttctggttccgtttcggtgcctcctttcctgaaaaaatgttacgatatggtggaagaccgcaacactgattctatcatccgttggagcgatggcggtgacagctttgtcatctccgacatcactcaattctccgtcacgctccttcccacctatttcaaacacaacaatttctccagtttcatcagacaactcaatatctatggtttcaggaaaattgatacggattgctgggaatttgccaatgagaactttgttagaggtcaaaagcatttgttgaagaatatacgtagaaggaaacatccacacagtgcagatcagcaaaaagcattgccacagcaagacaattgtgatgaaccatcacaagaagcaccgtatcatggcctttggaaagaagttgagaatctaaaacttgataaaaattcgctcacgcaagaattggtcaaacttaggcaacaccaggaatctgctgagaataagttgctgctcctgagtgatcgccttcaaggaatggaaaagcatcagcagcagatgttatcatttttagtcatggttgtgcaaagccctgggttcatggttcagcttcttcatcctaaggaaaataattggcatttggctgaatcatggaatatattggatcaagataaacaagatgacaagccagttgcttctgatgggatgataataaagtataaaccacctgtaggtgaaaaactaaagcctgtagttcctctgtctcctggtttcgaaaagcaaacagaacccgagctttctgcagaagggctaaaagacttgtgcgtcagttctgaattcttgaaagtgcttctggatgaaaaattatctccattagaaaatcattctccatttctcctaccagatttacctgatgatggttcatgggaacagctttttctaggtagtcctttcatgggaaacattcaagattctaataaagaaagtgaggggcacaccaatggtggaatggagatggaaccaacaatatctgagactccaaatgaaaattctcgaacttttgaatcgatgattgtagagatggagaaaactcgagaatgagttggagttgtatgcacatggtgggctgtcttcttggaatccatcagatatttttcagctgggctgtctcatactgagctaatggagctttagtttctgaaactaacaatatatagggaaggaagtaataatgtccatcagatatttttcagctgggctgtcttcacagattacttcacactataattatattatagtattaagtcgcaattattttctctcccatcttccttcagcagttgttagatcctcttctagaatccatattttggcttcctgatacatggtgtcggagatcaggagttgtatggtagtgcacaagtgcggcgacctatatatatagcggatcaattatttcttttatggaaaattgtaagggaaaacggcaactttattttttgtgccacattaaacagtggcacttgccttcatatatattataaaatttcacgaaaaaaaaaaaaaaaaaaaaaaaagg

SEQ ID NO: 119 - DNA, 1159 bp, Glycine max
  CDS (93)..(992)
gattccttttcctttctatctctctctcttcttatatttccacattccacgtgaaccttctagaactataatagaaagaaaccctccattccatggctccgccgctcgaacacaacggcgtttccacgagcggtgactctcagagatccattcccacgccgtttctcaccaaaacctaccagctcgtcgacgatcacaccatcgacgatgtcatttcgtggaacgattctggatcgtccttcatcgtctggaacaccaccgctttcgccaaggatttgcttcctaaatatttcaagcacaacaacttctccagcttcgttcgccaactcaacacttatggatttagaaaagttgtacctgaccgctgggagttctcgaacgagtattttcgaagaggcgaaaagcgtcttctctgcgaaatccagcgacggaagatcctctccgcatctcctccgccggcgggagcaactgccaccgtggcggttccgtcgccgctgccgctatctgcgatcccgacggcgaagccgatcgtgtcgccgtcgaactccgcggaggagcaggtgctttcgtcgaactcgtcgccggcgagagcaccggtggagctgttggacgagaacgagcggctgagaaaggagaacattctgttgacgaaggaattggtgaagatgagatcgctctgcaacaatatattcaatctcatgtcgaattacgctaacgctcaagcggacggtagttccgcggcggcggcgaagcggtgctccggcgaggatgcggtggaggagatgaatccgaagctgtttggggtggcgattggtaagaagcgagcgagagaggaggaaggacatggagcgaagtatgatacggctttgagtctgcatcagccgtttcatgcggacgtgaaatctgaagcgttggatttaccaggacgtggcgaaaataaaaaaacgccgtggctaaatcaatgtcatagagcaaatcagagggtgtgtaattgacacacgacgttgtaatagctaggtaacacgttaggttaagttaggggcgtcgtagagaatcagagtctgtaagcacggagacgcgcgtgtcaaatgtacgtcgttaaccgtttgggacttttttcgtagaagtttctcagaagaaaactatattttgttgttcc

SEQ ID NO: 120 - DNA, 1480 bp, Zea mays
  CDS (90)..(1229)
gcttcatgcgtggatcctcgtagaccccgacccgcgtgcactcaatccctaggcggcggcctccggcgcgaggctagcgggcggcacccatggcgtccgtggcggagctcaaggagaagcacgccgcagctacggcgtcggtgaactccctgcgcgagcgcctccgccagcgccgggagacgctcctcgacaccgacgtggcgaggtactccaagtcgcaggggagggtgccggtgagcttcaaccctacggatctggtctgctgccgcacgctgcagggccatagcggaaaggtatattctctggattggacccctgaaaagaattggatagtcagtgcctctcaagatggaaggttaattgtgtggaatgcattgacaagccagaaaacacatgccataaagctgcattgcccatgggttatggcgtgtgcttttgcacccaatggccaatctgtcgcctgtggtggtcttgatagtgcgtgctctattttcaatctcaattctcaagcagacagagatgggaacatgccagtatcaagaattcttactggacacaagggctatgtctcatcatgtcaatatgtcccagatcaggaaacacgtcttattactagttcaggtgatcaaacatgtgttctttgggatgttactactggacagaggatatcaatatttggtggtgaattcccatcagggcatacagctgatgttcaaagtgtgtccatcaactcatcaaatacaaatatgtttgtctctggctcatgtgatacaactgtgaggctgtgggatatcagaattgcaagtcgagctgttcgaacctaccatggacatgaggatgatgttaacagtgtgaagtttttccctgatggccataggtttggtactggctcagatgatggcacatgtagattatttgatatgagaacagggcatcaacttcaggtgtacagtagggagcctgatagaaatagtaatgaactacctactgttacatctattgcattttcaatatcaggaaggctactttttgctggttactccaatggtgactgttatgtgtgggacacacttctcgccgaggtggtacttaatttgggaaacctgcaaaactcccatgatggccgtataagttgcctcgggatgtcatctgatgggagtgcattgtgtacaggaagctgggacaaaaatttgaagatttgggccttcagtggacaccggaagatagtttgaaggccaacttttctcccccatgttgtatgttccttgttgccccttaacaacggacagtggtgattggtgaccaactcgacttgttcctgggaatccctttgttgttttgtaagctctgttcgcgctatgtttaatggaaaaatgtgcaatttgtcagtgtcacggcgctacatcttgttgagttggtaactgtttatactgttattacgagaatatcagtaacgtgtgatctgcccttttctttgtac

SEQ ID NO: 121 - DNA, 1734 bp, Glycine max
  CDS (15)..(1532)
attcggctcgaggaatgagtggcggaggagaagagggagcaactctggagttcactccgacgtgggttgtggccgccttttgcacagtcatcgtcgccatttccctcgccgctgagcgcctccttcattatggcggaaagtttctcaaagccaaggaccagaagccgctctacgaagctctccagaagatcaaagaagagctgatgcttttggggttcatttccctgcttttgacggttacacaaaacggcattaccaaaatctgcgttcgaccctctttgacgctccacatgctcccgtgtaatctccacgacgctccagcaaaccacgaatctcatttccagacatttttccctggaacagccaggcgccttctctctggggaacactccacccccgagtccgcctctaaaattggttattgctctcgcaagcacaaggtgcctttattatctgtggaagcacttcaccaccttcacatcttcatttttgtcctcgctgtcgtacacgtctccttttccgtgctcaccgttgtctttggaggcgccagaatacgtcagtggaaacactgggaagattctattgcaaaacagaactacgagactgaccgagttctcaaaccaaaggtcactcaggttcaccagcatgattttatcaggggtcgttttgctggttttggcaaagactctgctatagtcggttggttgctatcctttctaaagcaattttatggatctgtgacaaaatcagattatgtgacattgcgacatggtttcattatgacccactgcaggacaaatccgaagtttaattttcacaagtacatgattcgtgccctcgaagatgatttcaagcaagttgttggtataagttggtatctttggctctttgtggttatcttcttgttacttaatatcaatggttggcatacgtatttctggattgcttttattcctgtcattcttttacttgctgtgggcactaagctggagcacataataacccaactagctcatgaagtagctgagaagcatgctgccatagaaggtgatttagttgtgcagccatcagatgatcacttttggtttcaccggccccgtgttgtcctctttttgattcactttatccttttccaaaatgcttttgagatagcattttttttctggatatgggttacatatggatttgactcctgtataatgggacaagttcgatacattgttccaaggcttgttattggggtatttattcaggtactatgtagctacagcaccctgccactgtatgcaattgttacgcagatgggaactcactataagcgggcaatatttaatgatcatttgcaacaaaacattgttggttgggcacagaaggcgaagaagaggaaaggactaaaagctgatggcaatcctggccaaggaagttctcaggagagtgctaatacaggaatccagcttgggtcaattttcaagaaggcaactgctccaggagacagttcttctgcccccaaagctgacggaatcagctcagtgtagctatttaagtgaagatttacagtcttattttgtaaagttgctcacagattgcagttttctttatattattttctttgctaacataatgtagcattgtgggacatgtgtttgacttggtgtacgcataaggtcgaagtactatatgagtagatgctagtaatgctattgtcaaaaaaaaaaaaaaaaaaaaaaaaaaagg

SEQ ID NO: 122 - DNA, 1906 bp, Glycine max
  CDS (48)..(1841)
gttttctccttcattctagtctagtctttttcttctttttttcccccatgtatagctccaagttcagaaagctgttttgttctgtgttgttttcatggctctgttttggaggtttggccatggcagcaggtgaaagtagcagcagctccagagacctagaccagacaccaacgtgggccgttgctgctgtctgtactgttttcatcttggtatccatagcactcgaaaagagtctccacaaagttgggacgtggcttggacaaaagaaaaagaaggctttgcttgaagctctggagaaggtcaaggctgagttgatgattttaggtttcatttcactgcttttgactttcgggcagagttacattgtcagaatatgtattcccgaaaagctggcagacaatatgttaccatgtccgtataaatataaggaggacaaaaaggcatcagatagtgaagaggaacatcgtaggaaacttttatcttatgaacgtagatatttagctgctgatactacctcgttcaaatgcagcagggagggacacgagccacttttatctgtcaatggattgcaccagttacacatcctcgtattcttcttagcagtcattcatgtgctttacagtgctattacaatgatgcttggaagactaaagatacgtggatggaaggcatgggaagcggagacttcaactcataattatgagttcgccaatgctgcttcaagatttagacttactcatgaaacatcattcgtgagagcccattccagttttttgactaggattcccatcttcttctacattcgctgcttctttaggcagttctataggtctgtaaataagactgactacctcactttgcgcaatgggtttatcactgtccacctggctcctggaagtaaatttaatttccaaaagtatatcaaaagatcattagaagatgacttcaaggtggtcgtgggagttagtcctatcctctgggcatcagttgtagtttaccttctcatcaatgttaatggatggcacaccgtactttgggcagccttaattcctgttgttataattttggctgttggaacaaaacttcaagccatattggcaaatatggctcttgaaatcacggaaagacatgcagttgtccaaggaatgcctcttgtccaaggctcagacaaatacttttggtttggtcagccacagttagttctacatcttatccattttgctttgttccagaatgcgttccaaataacatatatcttgtggatatggtattcttttgggttgagaaactgtttccgtactgactacaagcttgcagtagtaaaagtagctctagggattttgatgctatgcctctgcagctatatcacccttccattatatgctcttgtaactcagatgggttcaaggatgaaaacagcaatatttgacgagcaaacaaacaaggctctgaagaaatggcacatggctgcgaagaagaagcagggaggagcagtgacgctaggaaagtcgagtgcacgaatcatggatggaagccccattggtaattcttcaacagtgcactccactggccccacactacaccgtttcaaaactactggccactcaacccgctcctcatcaacagcgtacgaggatcaagatcaagatcatgaatatgaatccgatggtgttgagttgtctccgttggcgtcgcaaacaacaagcttcattgtaagagttgatcatggcgaccaacaacaagcagaacatagacaagatagtgagggagaaaccaacagtagtagtgaaggtgaattctcatttgtcaaacctgaccctgtggaaattagaaccaccacatagcatatgatcatatattcatctctattcttatacataaatctttacataaaaaaaaaaaaaaa

SEQ ID NO: 123 - DNA, 1537 bp, Oryza sativa
  CDS (106)..(1248)
ggatcctgagatctagacgtgaacgtgcttggtgggaagagagaggctcaggcatgagagcatgcctctaaaataatgtccgtgcttacctgtgtgtttgataacatgggctcatcctgtagcagatctcattctttaagtgaggctgaaacaacaaaaaatgcaaaatctgcagacattgacaggcgaattttgcaagagacaaaagcagagcaacacatccacaagctcttacttcttggtgcgggagaatcagggaagtctacgatatttaaacagattaagctccttttccaaactggctttgatgaggcagaacttaggagctacacatcagttatccatgcaaacgtctatcagacaattaaaatactatatgaaggagcaaaagaactctcacaagtggaatcagattcctcaaagtatgttatatccccagataaccaggaaattggagaaaaactatcagatattgatggcaggttggattatccactgctgaacaaagaacttgtactcgatgtaaaaaggttatggcaagacccagccattcaggaaacttacttacgtggaagtattctgcaacttcctgattgtgcacaatacttcatggaaaatttggttcgattagccgaagcaggttatgtgccaacaaaggaggatgtgctttatgcaagagtacggacaaatggtgttgtacaaatacaatttagtcctgttggagaaaacaaaagaggtggagaggtatataggttgtatgatgtaggaggccagaggaatgagaggagaaagtggattcatctttttgaaggtgttaatgcggtaatcttttgtgctgccattagcgaatatgatcagatgctatttgaagatgagacaaaaaacagaatgatggagaccaaggaactctttgactgggttttaaagcaaagatgttttgagaaaacatcattcattctgtttctcaacaaatttgatatatgcgagaagaaaatacaaaaggttcctttaagtgtgtgcgagtggtttaaagactaccagcctattgcacctgggaaacaggaggttgaacatgcatatgagtttgtcaagaagaagtttgaagagctctacttccagagcagcaagcctgaccgtgtggaccgcgtcttcaaaatctacagaactacggccctagaccagaaacttgtaaagaagacattcaagttgattgatgagagcatgagacgctccagggaaggaacttgattcagagctaagactaggttgtaagtcacacagggaaggtaattaggacggcgagaggaacaaagtttcacactgtcacagctttatctgttgtaattcttttacacgtggaccattgattgaccttttggttcttactgtgggctgttcaggtctgtaccctattttttgttctctagttagccattgtgcaaattttccttgaatcagattctctacctgttgtctatgtgtgttatcttggtctgttaatttgcatagcccacttgttcattaaaaaaaaaaaaaa

SEQ ID NO: 124 - DNA, 1183 bp, Glycine max
  CDS (210)..(536)
cggctcgaggagaaagggcttttttgagtaataggattattatcagtgaaaagagttcccttttttctctgtaaataaaagggttgttgttattattattattgcctagtgtttgttttcagatctgtgtcgtattattaagcagaacaagcaagggtgcaaagtgggggtgtttttttcgctggatgagtggtagctgacactcacttatggcgtctgaaacggcgtcgtcggcggatgaagaaaccgttgttgttgtttcggctgctgcgggtgcaggaggaactgataagagaggcaagcaccggattcttgccgaactgaagcgtctcgaccaagaatccaagtttcttcaggaagaattggaagagcttgagaaaacagaaaatgtgtcgaccatatgcacagaattgctacaaaacatagacactaggcctgatccattactcccagaagtccatggacccgtaaatctcttatgggatagatggtttgaagggcctcaagatccacaggcatgtagatgttggatactttgatttgaagctgtgtcaattgccttgcgttgcaaataggatgccacatataactgcattaaagtgactctggagctgaagaaaatgtttgatgacatgttataccacgcacactaattctataatggatccttgcttttattacattagattctgttccgaatactgtttatgtgtaatcacattcatatactgcattcaactgagaagtatcattatttgtgcttgtaatcccaatccaactgttaatgcacctgaccttggtggactttcatgtgtgcacgagacgttagagacattttagcatcattcagccttgaaggtggtgtggcttttggaaaggcctttacaatgcaatggtttgacgagtcatcaactagtcctgaatgataacgagattttttgggcagagacctcttggggttgggagagcaaagaaagctcataatcccttgtttgagtcatttcacaattaaatgttatgataagattttgtaatcatgttacttctaagcctttttaagttttggtgttttatttaacaagccattactttttgcgtgccaaaaaaaaaaaaaaaaaaaaaaactaaaaaaaaaaaaaaaaaaaaaaaaaaaaaaaaaaaaaaaaaaaaaaaaaaaaaaaaa

SEQ ID NO: 125 - DNA, 4001 bp, Synechocystis PCC6803
  CDS (437)..(3556)
atcaaccagactcccaggccgcccaccaccatggtgataatggtcacaatccaaaaatcactcacttcctggagcatcaccaaccaggcaagaacaacgaacgggacgctgttggcaattaaatgaccaaaatcggcatggagaaagggtgcaaagacaattcccctcagaccttccaaggagcgggggtaaatgccaaattgatccaaactaccccgaaaaacaaacgcatctaagatttccagaagccaaaaaatggctaaaaaactgacaataatcgagaactgactttgcagggtggcccgcagggcagttttggaattttggctcatggtggtgacaaagagcgacggctgaggttaggagggccagggacccatccataatcaaggataaccaatcgccctagaatgggacagaccagaaactagatcctatggcgactatccacggtaattggcaaccctcccacggggaaaacggcggcaaactgtttctttgggcggatacctggggtcatcctttgccagaaaccattggcgatcgccatccctttgcgttggatctgccggatttgctacaggcctggtcgaatttgcccctggccttccccaaggcggatggggtgacagaggcagcccttactctgcatttacccagccatcgccagcaaaaaattcccctaccctttgtcacagggcaagatccggtggccatggatgcgaaatatctccactggcgatcgtggcaggtaaccggggtaaatctgaccccaagccaaacgttaacgttgctccaatctattcccctggggggccaagccttagctaacttaggatcagagttttacttttacggtcaactgcaccgctggtgtttagatttggtgctacggggtaaatttgtgccgggactggagcaaaggggggaagacggtaattactatgcccaatggattcctatcctcgatagcatccaagaccaaacccatttagcccaatttagccagagagtacctgcctgcgccctggccaacctgactgactcccaggagccccaaatgttggtggtggatttactacaaaaattattgcaagcccaaattggtgccgtcagtcccagcctagccaacgttaaagaagtctggttgaatgattggctccggggattaacccatggggggcaaacctccctcggcacaggcaaagctctacaacgattagccacatccttagaccattggtatttaccagtccagaattatttgggccaaaaaaataaccaagctttagcccaacggcaatggcggggggctctgcggttacaacctccagcggacgatggggggggaacctggcaactggattatggtttacaagccctggatgacggggaattttggctcccggcggcttccctctgggccatggccggcgatcgcctggtgtggcagggaaggagggttgaccagggggcggaaagtttactgcggggcttaggggtagctgcccaaatttacgaacccattgctgcaagtttgacggaaaggtgtcccacgggctgtgggctagatgccatccaagcctacgaatttatcctggcaatcgcccatcaattgcgggatcgggggttaggggtaatcctcccgccggggttagaacggggcggcaccgccaaacggttaggggtaaaagtggtgggggaagtgcaacggcaaaggggccagcggctaactctgcaaagtttaattaattacgacttgcaactaatgatggggagcggggacaatgcccggttattgacggccaaggactttgaagcgttactagcccaaaaatctcccctggtggtgctggacggagaatggattaccctgcaaccggcggacgtgcgggcggccaaggtcattttacagcagcaacaatctgccccgcccctcacagtggaggatgctctgcgcctcagcattggtgatttacaaaccgtctctaaactgccggtgacccagtttgctgctcggggcatattacaggaattgatcgacaccctccgtaacccggaaggagtgaaagccattgctgacccaccgggctttcagggtactttacggccctaccaagctcggggagtgggctggttagcttttctggaacggtgggggctgggggcctgtttggcagacgatatgggtttgggaaaaacaccccagttgctggcttttctgctccatttagccgcggaggatatgttagttaagccggtgttgattgtttgtcctacgtcggtgctgagcaattggggtcatgaaattaataagtttgcgccccaacttaaaaccctattgcaccatggcgatcgccggaaaaaagggcaaccgttggttaaacaggtcaaagaccagcaaattgtcctcaccagttacgctttactgcaacgggattttagtagtttgaaattggtggactggcaggggatcgtgctggacgaagcccaaaatatcaaaaatccccaagctaaacagtcccaggcggcccggcaattgccagcgggttttcgcattgccctcacggggactccggtggaaaatcgcctgacggaattgtggtcaattttagaatttttaaatcccggtttcctgggtaatcagagctttttccaacggcgctttgccaatcccatcgaaaaatttggcgatcgccagtcgttgttaattttgcggaatttagtgcggccgtttattttgcggcggttaaaaaccgaccaaaccattattcaagatttaccagaaaaacaagaaatgaccgtcttctgtgacctttcccaagagcaagctggtttatatcaacaattggtggaggaatccctccaggcgatcgccgacagcgaaggcattcaaaggcacggtttagttttaaccctattaaccaaactcaaacaggtttgtaaccatcccgatctattgctgaaaaagcccgccatcacccacgggcaccagtccggcaagctaattcgtctggcggaaatgctggaagaaatcatcagcgaaggcgatcgggtgttaattttcacccaatttgccagttggggtcatttactcaaaccctatctggaaaaatactttaaccaagaggtgctctatctccacgggggcactccagcagagcaacggcaagctctggtggaacgattccaacaggaccccaacagtccctatttatttatcctttctctcaaggctggcggcacagggttgaacctcacgagggctaaccatgtgttccatgtggaccggtggtggaatccggcggtggaaaatcaggctaccgatcgtgcttttcgcattggccaaactcgcaacgtccaggtgcacaaatttgtctgtacaggcaccttggaagaaaaaattaacgccatgatggcggataaacaacaattggcagaacaaaccgtggatgccggggaaaattggctcacccgcctagacaccgataaactccgtcagttgcttaccctctccgccaccccggtggattaccaagccgaagcgtccgattgatgaaagcacaaaaaaatacagtagggaaaattcatctcctactgtgggcctcgatttaacttgaggtcgagttatttattttgctaaagcaatttccctgcttagagcatgtttggaaagttgagttttggctgtttaatcgcccctagccccccttgggaagaggggaactgtcgcaaaagtccccttttttaagccggagctttagtgaggagatttagggggataaatacctagccttgcacttttcaaacactttcttagaaaatttgctagacagaaagttcgctcagttccctggtcatatggtcaaagggggaagcaataaaatctgtgctgttcaggctggaatcctctgccatggcttcaatcatttccttcatgatctgaatgccccgcaccgtgggcccaatgggtacgcccagggaattgtaggtttcccgta

SEQ ID NO: 126 - DNA, 1190 bp, coliphage T4
  CDS (603)..(1148)
gtacattgaatggcttgaaactcaaatttctttttctgaccgaatgattcagcaatataagcgattgcatcaaatgttttacaatacttgaaaataataaatacccttatctatttaaggtaagggtttattatgttattgactggcaaattatacaaagaagaaaaacagaaattttatgatgcacaaaacggtaaatgcttaatttgccaacgagaactaaatcctgatgttcaagctaatcacctcgaccatgaccatgaattaaatggaccaaaagcaggaaaggtgcgtggattgctttgtaatctatgcaatgctgcagaaggtcaaatgaagcataaatttaatcgttctggcttaaagggacaaggtgttgattatcttgaatggttagaaaatttacttacttatttaaaatccgattacacccaaaataatattcaccctaactttgttggagataaatcaaaggaattttctcgtttaggaaaagaggaaatgatggccgagatgcttcaaagaggatttgaatataatgaatctgacaccaaaacacaattaatagcttcattcaagaagcagcttagaaagagtttaaaatgacaattgaaaaagaaattgaaggattaattcataaaactaataaagaccttttaaacgagaatgctaataaagattctcgtgtttttccaactcaacgggaccttatggctggtattgtgtctaaacacattgccaaaaatatggtcccgtcttttattatgaaagcgcatgaaagcggaattattcacgtgcatgatattgattattcccctgctcttccatttactaattgctgtttagtagatttaaaaggaatgcttgaaaacggatttaagcttggtaatgcgcagattgaaactcctaaatcaattggagttgctactgcaattatggcacaaattactgcgcaagttgcttctcaccaatacggcggaacgacttttgcgaatgtagataaagtactttctccttatgttaaacgcacctatgcaaaacatattgaggatgcagaaaaatggcaaatcgctgatgcgttgaattatgctcaatctaaaacagaaaaagacgtatacgatgcattccaagcttatgagttaacgtaagtcaagctcatgtaaaatctgcctaaaacgggaaactctcac

SEQ ID NO: 127 - DNA, 939 bp, Zea mays
  CDS (106)..(708)
cccaaattcttgggtggacccacgcgtccgcccacgcgtccgaaaaaccctcgctccccacaacccgccgccgcccacgccgccgcctgtaccagcggcgtcaagatgagtcggcaccctgaagtgaagtgggctcagaggatcgacaaggtttacatcactgtacagttacctgatgccaaggacgctaaggtcaatttggaaccagatggtgtcttcacattctctggcagtgttggtacaaacttatatgaattgaaactagatctgaatgacaaagtaaacgttgaggctagcaaaataagtgtgggtgtcaggtccatattctgtattgtagaaaaagctgaggccaaatggtggaagaaacttgttcgagatgatcaaagggcacctcactttgtgaaagttgattgggacaaatgggttgacgaagatgatgatggtgctgatgtcaacttggatgggatggacttttcgaattttggcggcatgggtggtatgggtggcatgggtggtatgggtgatatggctggcttgggtggtcttggtggcatgggtggaatgggcggtatgggtggtatgggaatggatgattttgaggatgatagtgatgaagaagaagtgtcgaaacctcaagctgccggacatgctgctgaggccgagaagactgagtcggcggaagccaagactgagtcggctcagagcagttgaagatgctttcgacatgatctaaactagttgtatcgtcaagttaattctgctgaatcgatggacaaacttctacgttgttggcactggccgatcccagtgacttgccctaaaatttacgttctgtctttacatgggcatcctagtgttgtgctcatcacattattgatattgtttctgtgatgcttcctttggtcgacaatcatgtgctggagtttggtttaaaaaaaa

SEQ ID NO: 128 - DNA, 2019 bp, Zea mays
  CDS (99)..(1757)
ctctctctcgaaccttcttccaaagcacccgaaccctagtgatctcggaaccctagccgcgcgcggatctcggcttttccccttcctccacgccagccatggacgaggacttcgagatgcctcccgccggcgccgatgagatgatgggcgacgacgagatgggcgacttcggcggcgacgagggcccggtgatgaaggtgggcgaggagaaggaggtcggcaaggaggggctcaagaagaagctgctcaaggagggcgagggctgggagactcccgaggtcggcgacgaggttgaagtgcattacacgggcacgctccttgatgggacaaaattcgactcaagccgtgatcgtggagaacccttcaagttcaagcttggacaaggtcaagtgataaagggttgggatcaaggaatcaagaccatgaagaaaggagaaaatgctatttttaccattcctccagagctggcttatggagcatctggttcacctccaactatcccacccaatgcaaccctgcagtttgatgttgagctgctttcatggaccagtgtcaaagacatttgcaaagatggcggcatattcaagaagatccttaaagagggagagaaatgggagaacccaaaggatcctgatgaagtacttgtgaaatatgaggcccgtctggaagatggtactgttgtatccaagtctgagggggttgagtttactgtgaaagatggctacttttgtcctgccctggccaaagctgtcaaaaccatgaaaaaggcagagaaggtgctccttacagtaaagccacaatatggatttggtgagaagggtagaccagcagctggagaggaaggtgctgtgccgccaaatgcttcgctgctcattgaccttgagttgatttcatggaagactgtcacagaaattggggatgataagaaaatccttaagaaggttctcaaggagggagaaggttatgagcgtcccaacgagggtgctgttgttgaagtcaaaattatcggaaagcttcaggatggcgcggtgtttacaaagaaggggcatgacgaagagccatttaaattcaagaccgatgaagaggaagttattgccggtcttgatcgtgctgtgttgaacatgaagaagggcgaggttgctcttgtcacaattcctcctgaatatgcatttggttcaactgagtcaaagcaggatcttgctgttgttccacctaacagcacagtaatatatgaagttgagcttatttcatttgtgaaggacaaggagtcgtgggacttgaacaatgaagagaagattgaggctgctggtaagaagaaagaggaagggaatgcattgttcaaatcgggcaaatatgctagagcttccaagcgatatgagaaggctgccaagtacattgagtacgacacttcgttcagtgaagatgagaagaagcaatccaagcaactgaagatcagctgcaacctaaacaatgctgcctgcaaactgaagttgaaggattacaaggaagctgcgaagctttgcaccaaggttctggaactagacagccaaaatgtcaaggctctctacaggagggtgcaagcttacattcaacttgctgacctagagctagcagaggccgatatcaaaaaggcactggaaatcgatcctgacaacagggatgtcaagttggaatataagatcctgaaggagaagatcaaggagtacaacaagaaggacgccaaattctacagcaacatgttcgccaagatgacaaagtagcttttggggtggaggatgttgtggtgaagcgaagggattaaaaacaccgatttctgctgccgaaggacttcgcccgttgcttaacttctcgcttttcgcatactttgtagtcaattagtgtgcacggatgcttggatatgtgaaactgaggaacatgtacttcgaggattattattggttctgaatttttatgttttctggttcttgttaggaccgttgaatgttctctctatataattttcggacacatgttcttaat

SEQ ID NO: 129 - DNA, 2734 bp, Saccharomyces cerevisiae
  CDS (333)..(2462)
agcttaatcggattattaactcatacgcttgtcacatattgttcgaacaattctggttctttcgagtttcgcagaactttttgaatttttcttttttttctagaacgccgtggaagaaaaacacgcgcatggttttatgagcggttaattctcatcttaataccaaccaggtccttccgccaccccctaaaacatataaatatgcagcttatcccttcaattcttaacatctgtgacctcctcatttcttcccgctgtattagagttcaagaaatcatacctgatagaaaatagagtcctataaacaaaagcacaaacaaacacgcaaagatatggctagtgaaacttttgaatttcaagctgaaattactcagttgatgagtttgatcatcaacaccgtctattctaacaaggaaattttcttgagagaactgatatctaatgcctcggatgcgttggataaaattagatacaaatctttgtctgatccaaagcaattggaaacagaaccagatctctttattagaatcactccaaagccagagcaaaaagttttggaaatcagagattctggtattggtatgaccaaggctgaattgattaataacttgggtaccattgccaagtctggtaccaaagccttcatggaagctctatctgctggtgccgatgtatccatgattggtcaattcggtgttggtttttactctttattcttagttgccgacagagttcaggttatttcaaagagcaacgacgacgaacaatacatctgggaatccaacgctggtggttctttcactgttactctagacgaagttaatgaaagaattggtaggggtaccatcttgaggttattcttgaaagatgaccaattggagtacttggaagaaaagagaataaaggaagttatcaagagacattctgagttcgtggcctacccaatccaattagtcgtcaccaaggaagttgaaaaggaagttccaattccagaagaagaaaagaaagacgaggaaaagaaggatgaggaaaagaaggatgaagacgacaagaaaccaaaattggaagaagtcgatgaagaagaggaaaagaagccaaagacgaaaaaagttaaagaagaagttcaagagatagaagaactaaacaagactaagcctttgtggactagaaacccatctgatatcactcaagaagaatacaatgctttctataagtctatttcaaacgactgggaagacccattgtacgttaagcatttctccgttgaaggtcaattggaatttagagctatcttattcattccaaagagagcaccattcgacttgtttgagagtaaaaagaagaagaataatatcaagttgtacgttcgtcgtgttttcatcactgatgaagctgaagacttgattccagagtggttatctttcgtcaagggtgttgttgactctgaggatttaccattgaatttgtccagagaaatgttacaacaaaataagatcatgaaggttattagaaagaacattgtcaaaaagttgattgaagccttcaacgaaattgctgaagactctgaacaatttgaaaagttctactcggctttctccaaaaatatcaagttgggtgtacatgaagatacccaaaacagggctgctttggctaagttgttacgttacaactctaccaagtccgtagatgagttgacttccttaactgattacgttaccagaatgccagaacaccaaaagaacatctactacatcactggtgaatctctaaaggctgtcgaaaagtctccatttttggatgccttgaaggctaaaaacttcgaggttttgttcttgaccgacccaattgatgaatacgccttcactcaattgaaggaattcgaaggtaaaactttggttgacattactaaagatttcgaattggaagaaactgacgaagaaaaagctgaaagagagaaggagatcaaagaatatgaaccattgaccaaggccttgaaagaaattttgggtgaccaagtggagaaagttgttgtttcttacaaattgttggatgccccagctgctatcagaactggtcaatttggttggtctgctaacatggaaagaatcatgaaggctcaagccttgagagactcttccatgtcctcctacatgtcttccaagaagactttcgaaatttctccaaaatctccaattatcaaggaattgaaaaagagagttgacgaaggtggtgctcaagacaagactgtcaaggacttgactaagttattatatgaaactgctttgttgacttccggcttcagtttggacgaaccaacttcctttgcatcaagaattaacagattgatctctttgggtttgaacattgatgaggatgaagaaacagagactgctccagaagcatccaccgcagctccggttgaagaggttccagctgacaccgaaatggaagaggtagattaggtagaacatcatggccttgaataggttataaacaaaacataatataacgtataggtattcgaatgaataaataagtatgtaaatagggcatctgcatggaaataactgggtaaaacattacaatgtatttttttagagttttcgctattccgacgcgtctagtgtgtcatacaaaacgcgaagaatctgaaatcgtgaaatatactaagaatataactgaaatagcttaagcataaatgaactttactgcgaagataaagggtatgttgaaa

SEQ ID NO: 130 - DNA, 2280 bp, Saccharomyces cerevisiae
  CDS (361)..(2130)
aatattctatgtctggcaacttctgatgatactttcaagacaaacgccgcaattgaccaaactattgaactaaacgcaagttcaatatacataatatttgactatgagaactgatatcttcgtgaagattcgtgtagtatgatagaacattccagaaaaaaaattcagattcatcgctctctcttcgcttctcctcctttaaggaataaagaaaaaatcacatacatagattaagtaaataggatctgctagaaaaattatatatagatcaatcatcttattaaggtatcttgtttaagcccaaaagtctgctcccaaattcctcactgtagctactaaaacaacctatacgcaagaaagatgtcattgacagccgatgaatacaaacaacaaggtaacgctgcatttaccgctaaggattacgataaagcgatagagctcttcactaaagctattgaagtttctgaaactccaaaccatgttttatattctaacaggtccgcctgttatacttctttaaagaaatttagtgacgcattgaatgatgctaatgaatgtgtcaaaatcaatccatcttggtctaagggttataatagactcggtgccgcccacttaggtcttggcgatctcgacgaagctgaaagcaactacaaaaaagccttggagttggatgccagtaacaaggccgccaaagaaggattggatcaggttcatcgtacccaacaggcaagacaggcacagcctgatttagggttgacacagttgtttgctgacccaaatttaattgaaaatttaaagaagaacccaaaaactagcgaaatgatgaaggaccctcaattagtggctaaactgattgggtacaaacaaaatccgcaagctattggccaagatctgtttactgatccaagattaatgaccatcatggctacattgatgggggttgatttaaacatggatgatataaaccaatcaaactccatgccaaaggaaccggaaaccagtaaaagcactgaacaaaagaaagatgctgaaccacaaagcgattccactacgagcaaggaaaattcctctaaagcaccacagaaagaagaaagtaaggaatccgagccaatggaagttgatgaagatgactctaaaattgaggccgacaaggaaaaggccgaaggtaacaagttttacaaggcacgtcaattcgatgaagctatagagcactacaacaaggcgtgggaactgcataaagatattacctatttaaacaaccgtgctgctgctgaatacgaaaaaggcgaatacgagacagctatttctaccttgaatgatgctgttgagcaaggtagagaaatgagagcggattacaaggtcatttccaaatcatttgcgcgtattggtaatgcctatcacaaattgggtgacttgaagaaaactatagaatactaccaaaaatcattgaccgaacatcgtactgctgacattttgaccaagttaaggaatgctgaaaaagaattgaagaaagctgaggcggaggcgtatgttaaccctgaaaaggcggaggaagcccgtcttgaaggtaaggaatattttaccaagagtgattggccgaatgctgttaaggcttacactgaaatgatcaaaagggcacctgaagatgctagaggatattctaatagagctgctgcactagcgaagttaatgtctttccctgaagctatcgcagattgtaacaaagccattgaaaaagatccaaatttcgtgagagcttatatcagaaaggccaccgcacaaattgctgttaaagaatatgcttccgctttggaaacactagatgcggccagaaccaaagatgctgaagtgaataatggttctagtgcaagggaaattgatcaactgtactacaaggcaagccaacaaagattccaacctggtaccagtaacgaaaccccagaagaaacctatcaaagggccatgaaagatcctgaagtggctgcgatcatgcaagatcctgttatgcaaagtattttgcagcaggcccaacagaatcccgctgctttacaagaacacatgaaaaatccagaagtattcaaaaagattcagacgttgatcgctgctggtatcatccggactggccgctaaaaataatacgaaatataactttattatcttgaattctttttttactgctttttcatacatacgtacatataatgatcttctcacttagtatactaaatttgtttcatgctatggttgatatttgagaaatcggaacttgaagataataag

SEQ ID NO: 131 - DNA, 2097 bp, Saccharomyces cerevisiae
  CDS (762)..(1919)
tgtcttagcttattagtaatatccacctgcgcacaaattttgtaaatcccctactaatttaatttgaattcaaattggctcgtgatctgttgacccttgttagcaacgtttgtaatcttcctcaccgaattgcgtcgttttgaataatatatatgattgaaaatttttcaagagaaaagaaaaatttttccttccgcggtcagccattgctaaaaaaaggcctccgttaggagtcgaatagaggacaacaacaatacattgccactttaattttaaatgcttgcatattaactagcgatcagatgctctgctctatataaaataaattattgatacggtttctagtctcggttgatgataagagtacgttaatccacctaccgagcattaccaagatatctggcactttatatgtagagagtctgtgttctcaagtttacttgtgcggataatgagcttaaagacttaaatactaaaagcgtatgcgttcgtatctctgtttaggcaccttgtacagtttcacagaaaactgtgtaatgtgtgattatagtacacagaacaaaataacttcacctcatctctttcttaacgcagtgaggaaaaaggtggaaaaaaaagaaagaaaaaaagaatatgtgtaatttccggcacttttcagagcgatgagcttaaattcaaaagcagcattgaattaaaagtgaggtcttgagcactacattctagcaagtaaaagaaaagaataaattggttttgcatctagaatgagctccgttaacgcaaatggaggatataccaaaccacaaaaatatgtgccagggccaggtgatcctgaacttccaccccaactatccgaatttaaagataaaacatcggatgaaatcttgaaagaaatgaacagaatgccttttttcatgaccaagttggatgaaacagacggtgcaggtggtgaaaacgtggagttagaagctttaaaggcattagcttatgaaggcgaaccacacgaaatcgctgaaaatttcaagaagcaaggtaacgaactatacaaagcaaaaagattcaaggatgcaagggaactttactcaaagggcttggctgtagaatgcgaagataaatcaataaatgagtcactatatgccaatagagcggcatgtgagttagagctgaaaaattacaggaggtgtatcgaggactgcagtaaagctctaactattaaccccaagaatgttaagtgctactatcgtacaagcaaggcttttttccaattaaacaagttggaggaggccaaatcagccgcaacatttgccaatcaaaggattgacccagagaacaaatcaattttgaatatgttatcagtgattgatagaaaagaacaagaattgaaagcaaaagaagaaaaacagcaaagagaagctcaggaacgtgaaaacaagaaaattatgttagagagcgcaatgacgctgagaaacataactaacatcaaaactcactctccagtagagttacttaatgagggtaaaataaggctagaagacccaatggattttgaatctcaattgatctatcccgcattaattatgtaccccacgcaagatgaatttgattttgtaggtgaagtaagtgagttaactactgtgcaagaacttgttgacctagttttggaagggccgcaagaacgcttcaaaaaagaaggtaaggaaaacttcacaccaaagaaagtgttggtgttcatggaaacaaaggcaggtggtttgattaaagctggtaagaaactgacatttcacgatatcttgaagaaagagtcgccagatgtaccattgttcgataacgctttgaaaatatatattgtgccaaaggtagaaagtgaagggtggatttccaagtgggataagcaaaaagccttagaaagaagatctgtgtgaagtgtcaaatagttaaaaatatgtaacgcaaagttgtagatagaaataacaaagcaagaaggaaaagtaaagaaagtgaacgatatacgtaatgcagggggaataccagagtatttaaagtgtacttgatttaatgttaaccagtttgaatttttcttttctggggtaatcgaattca

SEQ ID NO: 132 - DNA, 820 bp, Saccharomyces cerevisiae
  CDS (193)..(654)
acaaaattacccgcgcaggcctatttttctagaagacagaagaaaaaagtgggcagagaaagcgaggaaaaaaagaaatacatatgaagaagaaaaaagctgaaatttaagcaaatactttttggacaaaatcatcaaactactactaaagtttgaaacgatcggaaagttacaacacatttacgataaaatatggttgtcttgaatccaaataactggcattgggtggataaaaacaccttaccttggtctaaggactacttgaacggtaaattaacgagtttgtccactgtttcctctgatgggaagagcaaaattgagttaacccaggtgagtagcatcaccggtgactccaacgtatctcaaaggaagggcaagccgatttgctactttgacttacagttgtcgatgaacgtcaaagtgacaaatttggatactaataaggacgacgaggatgatgacggcatacttgcggacgggaaactagaaattccagagtttatgcatgacgagtctgatattccgattttgtcgcaagggtttgatgcttttgatggattggttaggtctgaatttgtccctaaagtagtggaaacgctactaaaataccaagatgacttgattaaagaacactcaaaggatatacaagtttgatgtgttcatgtaacgaaaaggggagcgttgcatagatagaccaccgccccttttaatttttccagcgttttcaattgttattcttcttcttcctcatactcacccaatacataacatgtatacacacatacatagataatgaagaaaatagcagtggtagaaaaac

SEQ ID NO: 133 - DNA, 1126 bp, Oryza sativa
  CDS (68)..(706)
aaaacctcgcaaaaccctcggccctcacccgccgccgccgccgtcgcctccaccggtaaacggcagcatgagtcggcaccctgaagtgaagtgggctcagaggattgacaaggtttacataactgtacaattagctgatgctaaggatgctaaggtcaatctggaaccagaaggtgtattctctttctctgctacagctggaactgatgggaacttatacgaatcaaagctagagttgaacgacaaagtaaatgttgaggagagcaaaataagtgtaggtgttaggtccatattctgtattgtagaaaaagctgaggccaaatggtggaagaagcttgttcgagatgatcaaaaggcaccacactttgtgaaagttgactgggacaaatgggttgatgaagatgatgatggtgctgatgtcaacgtggatggaatggacttttcgaattttggtggcatgggtggaatgggtggaatgggcggaatgggtgatatgatgggtggcatgggtggtatgggtggcatgggtggcatggctgagatgatgggtggcatgggtggtatgggcggtatgggtggcatgggtggcatggatgagttcgaggacgagagtgacgatgaagaagaagtgtctaaacctcaagacgcagagaaggctgctgaagccggaaaatcccaggagtcggacgctaaagccgagacaagttagagcaatcgaaggcccctctacataattcctttctctgttgcatcccgtcttttatggatctggtgaactgaagaaaacattttacgttatgacggtagggatgggtgctcccttgtagaacgatgctatgaaactggagctccaactgagtacgcaaaccattcttggattgtttttcttaatgcgctttgatgcttcatcgctctgcaatcatatattaagctttggatgctttaatctgcttttgtgagatactgctgtgcccgtgctagagtccactgagcatgcaacaattcatgtgatctgacgatgcttgtgctagacgagtgaggcagtagcactgttagttcccaagcttgttttgaaaggatgcatagtgaatccctatttatttgtttaaaaaaaaaaaaaaaaaaa

SEQ ID NO: 134 - DNA, 870 bp, Zea mays
  CDS (71)..(565)
ttctcgtttcaccgtgcgccacaagcacacaactagggcgaccgccgccgacctacggccagctgtgcccatgtcttcgtcgggccctttgctggcgacgggaacccaccacaccggccgccaacctgaggttttgtgggctcagcgctccgagaagattttcttgactatctcattgccagatgcgaaagatgttgtgttaaagaccgatcctaagggcctctttaacttctctgctgttgtccatggggaaccttttagcttcactttggagctttttgattcaatactgtcagagggaagtaaaacgaagacaaagatgggcctgcgaaacataatctgctcaatccagaaagaaaagaaaggttggtggaagcgcttgctaaagtcagaggaaaagcatccatacatcaaagttgactggaacaaatggtgcgatgaggatgaagagtctgagttctctggggattcagatggtggctttgatgaggcaaatgaaggagatgaaagtgatgatgatgatgggatgctttatctccccgaccttgaaaagctaaggggcaagtgatctggctgcttcggtgaagggagtagggttgatgtaacaagttaccgttgacgtgacagagtaggcttatcatcgacgtagttggggtcttacttgctgagcatctgcgacggcttgagacttttaggcatgtcttctatctccgaagcactctttcggtctttcctgatcagtgagctagcgctctgaaaacgtagcgatgagctgtcccattttcgactaactatttagtgccagtgaatggcctaattctacaactatcacgatgtgcctatatgttaggggattatggattcaaaaaa

SEQ ID NO: 135 - DNA, 870 bp, Oryza sativa
  CDS (124)..(642)
cggacgcgtgggaaaaaaaaccctaatccatccactccaaatcgccacgcaggaagggaggaaaggaccaccagccaccgcgcgcgcccaaatcgtcgcagctgcttccccgaggagaagaacatgagtcgccacccgagcactaagtgggcgcagaggtccgacaaggtgttcttgacgatcgagctgcccgatgccagggatgtgaagctcaacctgaagcctgagggccagttcatcttctcggcgaagggccctgccgacgacaccccttatgagcttgatcttgagctctttgatgctgtgaatgttgaggagagcaaggcagctgttgcggcaaggtccatatgctatcttatcaagaaagcagagagcaagtggtggcctaggctgctgaagaaggaaggcaagccacctgtgttcctcaaggttgattgggataagtggcaagatgaggatgatgaagacattgggcttggtgacttcggtgatatggacttctcgaagctgggcatgggaggtcctgatgatgatcttgaggacgatgacgaagatgacacggctgacagtgctaacaaagatgatgaagacattaaggcagaggggagcggggaacaggaagctgctggtgaagcgaagccgtgaaatacctgagagttttagaacgctatgcttgacttgtttgtgacgctgccaggtcttaagatttttttggtgtaaactctggagagtggatcactgccactaaagtaaagtagtagttatggtttagtagctccattttgttaaaaaactttgtgcattgcacactgttctgttatgtgaatcgccatatttgcatcaaccattgcaaagctatccagccaaaaa

SEQ ID NO: 136 - DNA, 845 bp, Zea mays
  CDS (90)..(617)
ggcagtcttcccccaagacgtctaaaccccaatccctaaatccccgacgcagaccacacgacgcgcacctccgttcacgaggcggaagcatgagtcgccacccgatcactaagtgggcacagaggtccgacagggtgttcttgacgatagagctgcccgacgcccaggatgtgaagctgaacttgaagcctgaaggccatttcaacttctcagctaagggctcagatgacttgcgctatgagtttgacattgagctgtttgatgctgtgaatgtggaggagagcaaagcagctattgccccaaggaccatatgctacctgataaagaaagctaagagcgggtggtggccaaggctgctgaagcaggagggcaaaccacctgtgttcttgaaggttgattgggacaaatggcaggacgaggatgatgaagacgctggatttaatgactttggtggtatggacttctcgaaactggacataggaggtgctgatgacgacgatattggggatgatgaagatgatgtggttgaaagtgctaacaaagatgaagaaggaggtaagacagaagagagcaaggaggaggaagcagctcctgcggctgcagaggaagtgaagccatgaagaatcatttgactttgctccgcgccatgggtgtccacggtatctagctaggctagacgttcccttggatttttggtgtaaaatctggaggtcgaaccactcactgcctattgaagtaaaggatacaaaaacagttgtgctgtcttagtttttggctgaaccctgtgaactgctgctacaatatttggtcagagtttatatgcatccatcatgcgacgcaaaaaa

SEQ ID NO: 137 - DNA, 1527 bp, Oryza sativa
  CDS (121)..(1242)
cagaagcccgtggaagcttcggaagcggcgcggcgcggcgctgggcgggggagaagaccagagcggcgaggaaggaggcggcgcccagcggggagagcgagcggctcgacgccgacggccatggcgctgctgatggatcccggggcgggaggccccctgacggagagcgagaaggccgacctggacgccatcgccgccatcaaggagtcggcggcggcagagtacaaggagaagggcaaccggctcgtcaagatgggccggagccactacgccgacgccgtcgactgctacaccaaggccattgcccagatggagccgctgccgccgccgccggtgccatcccccgacgcctccgtcctcttcgccaaccgcgcccacgtcaacctcctcctcggcaaccaccgccgcgccctcgacgacgccgcccgtgccgtccagctctctccctccaacgtcaaggcgtactaccgggcggcgaaagcggcgattgctctcggcttgctgccggaggcggcggccttctgccggcgggggatcgagcaggaccctgctaatgaggagctcaagaaattgctcgcacaagtggacgcccaacagagtgagcaagatcgtcatagggccaaggttgcgcaggccgtgtccgctgcgaaggatattgttgccgctatagagaagagggggttgaagcttgggaaggcagcatatcaagagcttaccggtgtaaagaagccgaagttggatgagcagggtgtgcttcactggccagttcttctgctctacccggaggtcatgtcgagtgacttcatcgaggattttccggagacagatactttcgtgccccaccttgatgtcatgttctcagaaagttctccaccattaccatgggatgataaacacgcttacacacgggatgctgttgagttatattatcaggctggcgttggcacagttctgtccaaaagtgaaatattgaaaattcttttggaaggcactatggactcaaagtcacttcctgaaagcctgcttgatgaggaagatggagaaaatgatgatggcaagagcagcacaattacatcatcagataagggttctgtgaagtggatcaatgtaaaagagggaaaaactcttcaagaagtgctgcagcataaagacttcatcatccctgcaattcctgtgttctttgttgtttcaagaaaatccaccttttacagaaagttcaaggcaggaaactggtctttgccgtaatgcttagcgtgattcagtttggcacatttggaagatgattagtgcggtacgcgtatgatcagagaagaaaagctggccacctagtcattcttgtatggttttatatgttgctttatagaatgatgaggtgtgttctttcctgtatttggtacaattctcaagtattttcctatcctttgcttgagatgctcagtatgccgtttctggagaaacacactgagaatgtacttatgtatggacagctttgggcctgatttagcgcttggcacaaaaaaaaaaaaa

SEQ ID NO: 138 - DNA, 1306 bp, Zea mays
  CDS (42)..(1100)
cgcctctccctcctcttcctctcaacaccaccggcatacccatggcgaagtacggcgagggcgacaagcggtggatcgtggaggagcgcgccgatggcaccaacgtccacaactggcactgggcggagcgcgactgcatcgagtggtcccgcgcgcggctctcctcgctgctcgcgggcctcaccgtcctcgacggcgaggacggcctcacgctccgcaccgtcgcgctcgacaatctcgacggcgaggcctacgtcaacatccgcaagggcaaggtcatcccagggtacgagctctcgctcaccctctcttgggaggccgaggccgcttcggagtccggagctgtgaaggtcgccggcaccgccgaggtcccctaccttgccgacgagaacgctgacgaggaccccgacctccacatcaccgtgcgcggtgacgagacgcccctcgcgctccgcgccaaagatgccttcctctcccgcggcaaacccatggtgctcgaaaagatccgggagttcgttgctgccatggccaagggtggaccggcgaaggacgagctggattccaagaaaactcctgcgaaggtcgccgctgcagcgcctggcgccgctccggcgaagaaagaggaggtggtggctcctgcaccggctgcggggaagaaaaaggccaaggggaaggacaaggaggggttcaagaccattaagatgacggagacgttctactgccgctcaaaggacatatatgagatcttgatggatgagaacagatggaaagggtttacacagagcaatgcgaagatcagtagagaggttggaggggaatttagcctctttgatgggtgcatcactggcgtcaacgaggatctgcaggaaggaaaactgattgcgcagaaatggcggtttggaagctggcctgacggcttgtactcctcggtccggttgatgttggatgagcccgagtctggagttacagtcataaaactcaaacaaactggtgtgccagaggaagacaagtatgggaattcaactgtggttgagaacacggagagaggctggagagatctcatattccagcggatacgtgggatgtttggttttgggatctaaagagtctatagagaggcgatttaatttggcatgatgtcctaattcaaatttttacggggtcaggccatgaatgctatagcaatccatgtttctcacccagttttttttcttcatgtcggcaaaacgcaaaactctgcatatgatggggatttgaaaacatctgttattcatcaggctaaaacgctgcagtattccttgccccc

SEQ ID NO: 139 - DNA, 2005 bp, Zea mays
  CDS (88)..(1830)
accccaagcgcgcacccatcttctggcctttccagccgccaagccttctagaagcttcaagagctcgattcgatcggaaccctcgccatggccgacgaggcgaaggcgaagggtaacgcggcgttctcggccggccgcttcgaggaggcggcgcggcacttcacggacgccatcgcgcttgccccagacaaccacgtcctctactccaaccggtcggcggcgctcgcctcgctccaccgctactccgatgctctcgccgacgcgcagaagaccgtcgacctcaagcccgactgggccaagggctactcccgcctcggcgcggcgcacctcggcctcggcgacgcggccagcgccgtcgccgcctacgagaagggcctcgagctcgaccccagcaacgagggcctcaaagcggggctccaggacgccaagaaagccgccgccgcccctccgcgccgcgggtcgtccggccccgacgccatcggccagatgttccagggccccgagctgtggagcaagatcgcgtccgacccctccacgcgcgcctaccttaacgagcccgattttatgcatatgatgcgcgaagtgcagaggaaccccagcagcatcagtatgtatctctccgatccccgcatgatgcaggtgctcagcctcatgcttaatgtcaagatccagagacccgaggcctccgagccgtcgcagtctaccccgccgccgccgaagcagcagcagcagcagcagacgccgccttctgagacgaaggctagggatgtggagcccgagcccgaggcagagccgatggatttgactgatgaggaaaaggaccgcaagcagacgaaagctgctgctcagaaagagaaggagttaggtaacgcagcttacaagaagaaggacttcgaggtggcaatccagcattacaccaaagccttggaacttgacgacgaggatatttcctatctgactaaccgagcagcagtctacattgagatgggaaagtacgatgaatgcatcaaggactgtgataaggctgtggagaggggaagagaacttcgtgctgatttcaagatgatttcaagggcactgacaagaaaaggaacagctctggtcaaacttgctaagacctctaaggattttgatattgctatcgagaccttccagaaggctctgactgagcatcggaacccagacactcttaaaaagttaaatgaggctgagaaagcaaagaaagagttagagcaacaagagtattatgatccaaaattggcagatgaggagagagagaaaggcaatgagttcttcaaggagcaaaaatacccagaagcaataaaacactacacagaggctctcaagagaaacccgaaggatcctagggtttatagcaatagggccgcctgctacaccaagttaggagccatgcctgaaggtcttaaagacgcagaaaagtgtcttgaacttgaccccaccttcaccaaagggtatacgaggaaaggtgcaattcagttcttcatgaaagaatatgacaaggccgtggaaacctaccaggctggcttgaagcatgacccgaacaaccaggaactgcttgatggtgttaagaggtgtgttgaacagatcaacaaggccaacagaggtgaaataagccaggacgaattgcaagaaagacagaacaaagctatgcaagacccagagatccagaacattcttaccgaccctatcatgcgacaggttctaatagatttccaggagaacccaagtgcggcccaggagcacctgaagaaccccggggttatgcagaagattcagaagcttgtaagtgctgggatagttcagatgagatgatcgagcgatgcgatgattggctttgttcgttcacgtgcaccctggtcatacatatgttttaacaagcagcagcggcataagaatgaacctgttcgggggctaatcttattccttttggattgtaagtgcattgacattggataattcatgtttgtggcactgagtttcgagt

SEQ ID NO: 140 - DNA, 1554 bp, Aspergillus nidulans
  CDS (65)..(1261)
ctccatcgtcaaggaaggaacacggccctaactaaaccctagctaagggaagggaaacaagaccatggatgcctccaagctccgcgagcttcgcgacttcgtcgaggcgtgcaagaagaatccttcgctcctcgccgaccccaacctctccttcttccgggattacctccagagtttgggtgccaaaattcccgccgccgccccctctttcgaaagtcccaagagatcttccatggacgacattgatgacgacggtgatgacgacgacgatttggatatgagggatcccactcctgagcgagacgagctcgatgaagagattgttgagtctgatcttgagctcgaaggagaaattgtacagtctgaccatgatgacccaccacagaagatgggaaatccttcagtggaggtgactgaggaaaaccgtgatgcttcccaagaagcaaaaggcaaggctatggaagcaatttctgaaggaaaacttgaagatgctattgaacaccttaccaacgcaatagtgctgaatccactctcagcaatcatgtatggtactagagcatctgtgtttataaaaatgaagaaaccagctgctgccattcgtgatgccaatgctgctctagagatcaacccagactctgcaaaaggctataaaactcgtggaatggcatatgccatgcttggcaaatgggaggaagctgctcatgatctgcacacagcatctaacatggattacgacgaggagatcaatgctgtgctcaagaaggtggagcctaatgctcacaagatagtggaacatcgcaggaagtatgagaggttgagaaaagagagggaggaaaagagagcgcagcgtgatcggcttcgtcaacgtgcagaggcgcaggctgcttacgacaaggccaagaggaaggagcaatcgtcaagtcgctcatcaggaggtgcatctcccagaggctttcctggagggatgcctggtggtggtttccctagagggatgcccggtggaggtttccccgggggtggcatgcctgggggtttccctgggggtggcatgcctggaggtttccctggtggtgttcccggtaatgttgatatgagtaaaatcctgaatgaccctgacctgatggcagcattcagtgacccagaggtcatggcggctttacaagatgtgatgaacaatcctgccaactttgctaagcaccaagcgaatcctaaggtgggccctatcatcgcaaagatgatggccaagttcaatgggtcccagtgatggttatgtcgcagtcaggttttgtgagcagcaagcaaaggtttgttggacagtgaacaggtgttcttttcgtgcatctggtctgggagtgtgtttagcttgtgatgaagaacatgagtgtgtgtgttggtcgtggtgcatctggaggtgcgatgagcatgtgatgaaaaaaaaccaaacggctctatggtgatgtatgcaaaaagttgctttcgaacttgatttctcaattcacagatggtttgacagtttcttgaattatagaatgcttgtgtgctgctagtttccct

SEQ ID NO: 141 - DNA, 1235 bp, Oryza sativa
  CDS (121)..(939)
gcttctccaattttccaagcctgcctccaagcgcacgccacgatcttctagaagcgattcgcgcgcgccgccgcctcctcccctccccttccccggagcgaagccgccccgccgggggggatgtcgccggcggcggacagcgcggcgtcgaagcggcaggcggagctgctcaagcaggagggcaacgccttcttcaagaaggaccgcatcagcgccgccatcgacgcctacaccggggccatagctctctgcccaaaggttgcagtatattggaccaaccgagcactttgctacaagaggcggaatgagtgggttagggctgaggaagattgtagaacagctattcagcttgacagccactctgttaaggcacattacatgctcgggcttgcacttctcaacaaggacgaattggccgagggaataaaagaactagagaagtcgttggagcttggaaggggtgcacatccagcaagttacatggttgaagagatctggcaagagctttctaaagcaaaatacatagaatgggaaaatttatcaagcgaacgagtccgtcaattgcataagctgaaggaagcatgtaaagaagctcttaggaattataacagccttgacaatcctcctgcatatgtccccgaggaacagctaaatgagcttgaggaagtttttcggaatgccaggaagtctgatattccaacagaagttcctgatcatctctgctgcaaaattactcttgatattttcagagacccggtgataaccccaagtggaatcacgtatgagagggcggtgattcttgatcatcttcatagggtggggaagtttgatcctgtgacccgtgagacacttgaaccacaccaactggttcctaaccttgccatcaaggaagctgtccatgcatttttgagtgaacatggttgggcttacaggatgagatgactactttgaattacacctgggcttggagctttggaggcaacatttcagattgcaatatacatgtttcggttagtcaacttaaatgtgtcattttgtttatctttacatatttattggtggaaaaggttttacctgggatggctgtgtacagattccccttctctagctatccctcctctctactctgttcatgtgtaatgcttggtatcagattatcacttatccacagtaaaagaaaattaaagtggctgtcatactccttgttctctgattattggtttttggcgcactcg

SEQ ID NO: 142 - DNA, 1131 bp, Zea mays
  CDS (115)..(939)
caagaagccacctcaggctcacgccgcggttccacacgagcaaatcccgccgcttcctccccacgcaccccttcccatccttcccgaagcacgaggcgagccgggccgccggatatggcgccggcggcgccgtacggcggggccgagtcgcagcggcaggcggacctactcaagcaggagggcaacgcctttttcaggaaggaacgcctcagcgccgccatcgacgcctacaccggggccataactctttgcccaaatgttgcagtatattggaccaaccgagcactttgctataggaagcggaatgagtggactagagttgaggaagattgcagaacagctatccagcttgacagccagtctgttaaggcacattacatgctcgggttatctcttgtcaacagccaaagattatcagaaggaataaaatcactggagaagtccttggagcttggaaggggtgcacatcctgcaagctacatggttgaagagatatggcaggagctttctaaagcaaaatacatcgaatgggagagcttatcaagagaccgaacttgtcaactgcaaaagctgaaggtagcatgtaaagaggccctaacgagttacaacagccttgataacccagccgcaggtgcgccagtagaacagctaaatgagctcgaggaagttttcaagaaggctgcaaagactgatactccagcagaagtacctgaccatctctgttgcaaaatcacacttgatatcttcagagacccggtgatcaccccgagcgggattacctacgagagggccgtacttctcgaccaccttcaaacggtggggaggtttgaccccgtgacccgtgaggctcttgaaccgcaccagctggttcctaatcttgccatcaaggaagctgtgcatgcgtttttgagtgagcatggttgggcttacaagattagatgatcgctttggaatacaggttttggatactgtcggatgtgacggtgggatttttttgttcactgttggggggcagattttaatctgggatggctgcgtacagattcaccttctccagttgtgtacatatgagatgctcattatgatagtaattgtgaacagtacaccaaaggaagtgaagttgagcgtctg

SEQ ID NO: 143 - DNA, 2684 bp, Zea mays
  CDS (55)..(2478)
tcactggtgtgggccgtggctgtacgccgcagagtgaagcgagacgagacgacgatgcgcaagtgggcgctctcctccgcgctcctccttctcttcctcctcaccaccctccccgacccagctaagaagctacaggtgaatgcggaagagagcagcgatgacttagctaacccacccaaggtagaggagaagcttggtgctgtccctcatggcctgtccaccgactctgaggttgcccagagggaagctgagtctatctctaggaagactcttaggagctccgccgagaagtttgagttccaggctgaggtgtccagactcatggacatcatcatcaactcactctacagcaacaaggatatcttcctgagggagctcatatccaatgcctctgatgcattggataagatcaggttcctttcccttactgataaggaagttctgggtgaaggtgacactgcaaagcttgagattcagattaagttggacaaagagaagaaaatcctctccattcgggataggggtattggtatgaccaaggaggatcttattaataaccttggaaccattgctaagtctggcacttcagcttttgtcgaaaagatgcagtctggaggtgacctcaatcttattggacagtttggtgttggcttctactcggtgtacttggttgctgactatgtcgaagtggtcagcaagcacaatgatgataaacaatatgtttgggaatcaaaagctgatggatcgtttgctatctccgaggatacatggaatgaaccccttggccgtggaaccgagataagattacatctgcgagatgaggccaaggagtacttggaagaggataagcttaaggatttggttaagaagtactctgagttcatcaacttccctatctatttgtggtcaaccaaggaggttgatgttgaagtgccagctgatgaggatgagacaagtgaagaagaggattcgtccccagaaactacagaagaagagacagaagaagatgaagagaaagagaaaaagcctaagacgaagacgataaaggagactacttctgaatgggaacttctgaatgatatgaaggctgtatggcttcgcagcccgaaggaggttactgatgaggaatactcgaagttttaccactcactagccaaggacttcggtgatgacaagcctatgggttggagccacttcactgctgaaggagatgttgagttcaaagctttgctcttcattccaccgaaggctccgcatgatctctatgagagttactacaacagcaacaagtcaaacctcaagttgtatgttagaagagtgttcatctctgatgaatttgatgaccttcttccgaagtatctcagctttttgaggggtattgttgactcagacacactgccgctgaatgtgtcacgagaaatgctccaacaacatagcagtctgaagactatcaagaagaagctgatccgcaaagctcttgacatgattaggaaacttgctgaagaagaccctgatgagtacagcaacaaggataagacagatgaagagaaaaatgagatggaggagaagaagggccagtacgccaagttctggaatgagtttggcaaatcaatcaagctgggtatcattgaagacgcaactaacaggaaccgccttgcgaagcttcttagatttgaaagtaccaagtcggatggcaaacttgcctcccttgacgagtacatttcaaggatgaagccagggcagaaagacatcttctacctcacgggaagcagcaaagatcagctggagaagtctccgttcctggagaggctaaccaagaagaactacgaggtcatcttcttcaccgaccctatggacgagtacctgatgcagtacctgatggactacgaggacaggaagttccagaacgtgtccaaggagggcctgaagctgggcaaggactcgaggctcaaggacctcaaggagtcgttcaaggagctgacggagtggtggaagaaggccctggagagcgagagcgtggactcggtgaaggtcagcagccggctgcacgacaccccctgcgtcgtcgtcacctccaagtacgggtggagcgccaacatggagaagatcatgcaggcgcagacgctgtcggactcgagcaagcaggcgtacatgcgcggcaagagggtgctggagatcaaccccaggcaccccatcatcaaggagctccgcgacaaggtcgcccaggacaacgagagcgaggagctgaagcagacggcgaggctggtgtaccagacggcccttatggagagcgggttcaacctccccgaccccaaggagttcgcgtccagcatctacaagtcggtgcacaagagcctggacctgagccccgacgcggccgtggaggaggaggacgaggccgaggagcagccggaggtggaagagaaggagccggcggccaaggaggggtcggagccgtccttcgacaaggacgagctgtagtcggcgtgctgtggtctcgtctcgtcttcgggatctgttttgaagtctagctgtagctcccgtttagttgagatatcggggagcccactcactgccagctttgtgtttaggaacgtgatacgggatctttttttttttgttgcctgtctttgtacttgtacaaacctcagttcagtgactcggtctaattaccggctccgatt

SEQ ID NO: 144 - DNA, 2691 bp, Oryza sativa
  CDS (68)..(2500)
cgcggcgaggcgacgaactcatcacctccactctctgctgcaacacgagtgaatcggaggcggcacgatgcgcaagtgggcgctctcctccgcgctcctcctcctcctcctcctcaccacactccccgatccagctaagaagctccaagtcaatgctgatgacagcactgatgagttagttgatccgccgaaggtagaggagaagattggtggtgttccccatggcctgtccacggactctgaggttgttcagagggaggctgagtcaatctcgaggaagaccctcaggagctcagcggagaaatttgagttccaggctgaggtgtccagactcatggacatcatcatcaactcactctacagcaacaaggacattttcctgagggagctcatctccaatgcttctgatgctttggacaagattaggttcctggctctcactgataaggaggttttgggcgaaggtgacactgctaagcttgaaatccagattaagctggataaggagaagaagattctctccattcgggataggggtattggtatgaccaaggaagatctcattaagaaccttgggaccattgccaaatctggaacttcagcttttgtggaaaagatgcagactgggggtgacctcaatctcattgggcaattcggtgttggtttctattcagtatacttggttgctgactatgttgaagtgatcagcaagcacaatgacgacaaacagcacgtctgggagtccaaagctgatggatcattcgctatctctgaggatacatggaatgaacccctgggccgtggaactgaaataagactgcacctccgagatgaagccaaggagtacgtggaagaagacaagctaaaggatttggtgaagaagtactctgagttcatcaatttccccatttacttgtgggcaaccaaggaggttgatgtggaagtgccagctgatgaggatgagtcaagtgaatcaagtgaagaagaggaatcatcccctgagtctacagaggaagaagagacagaagagagtgaagagaagaagcccaagacaaagacagtaaaggaaaccactactgagtgggagcttctgaatgatgtgaaggctatatggcttcgtagccctaaggaggttactgaagaagaatacacaaagttttaccactcacttgctaaggactttggtgatgacaagcccttgtcttggagccacttcactgctgagggagatgttgagttcaaagctttgctctttgttcctcccaaggctccacatgatctctatgagagttactacaactctaacaagtcaaaccttaagttgtatgttagaagggttttcatctctgatgaatttgatgagcttcttccgaagtatctcagctttttgaagggtctcgtcgactcggacacattgcctctcaatgtatcacgagaaatgctccaacaacatagcagcctgaagaccatcaagaagaaactaatccgcaaagctcttgacatgattagaaaacttgctgaggaagatcctgatgagtacagcaacaaagataagacagatgaagaaaaaagtgcaatggaggagaaaaagggccagtatgccaagttctggaatgagtttggaaaatcagtcaagttgggcatcattgaagacgcaactaacaggaaccgtcttgcaaagcttctgagatttgaaagtaccaagtcggaaggcaaacttgcctctcttgatgagtacatttcaaggatgaagccagggcagaaggacatcttttacattaccggaagcagcaaggaacaattagagaaatcaccgttccttgagaggctaaccaaaaagaactacgaggttatctacttcactgaccctgttgacgagtacttgatgcaatacctcatggactacgaggacaagaagttccagaacgtctccaaggagggtctcaaactcggcaaggactctaagctcaaggacctcaaggagtccttcaaggagctgaccgactggtggaagaaggctcttgacaccgagagcgtggactcggtgaagatcagcaaccggctgagcgacaccccctgcgtggtggtgacatccaagtacgggtggagcgccaacatggagaagatcatgcagtcacagaccctctcggatgccagcaagcaggcgtacatgcgcggcaagagggtactcgagatcaaccccaggcaccccatcatcaaggaactccgtgacaaggtcgcccaggacagcgagagcgagagcttgaagcagacggcgaagctggtgtaccagacggccctcatggagagcggcttcaaccttcctgatcccaaggacttcgcctccagcatctacaggtcggtgcagaagagccttgacctgagccccgacgcggccgtggaagaggaagaggaggtcgaggaggccgaggttgaagagaaggaatcatccaacatcaaggaggaggcggagccgtcgtcgtatgataaggacgagctgtagtgatgtgtcgccaccaactgttgtttttttatctagctcttgtgttaggttgtttaaaaatgtgatggtttcgagggacgtccatttttccatgcgaaaatgcttagtaccatgatacggggattttgtcgatgtacgtagtttgtgatactctagttcaaattaatggccgtctaatttcgatcaag

SEQ ID NO: 145 - DNA, 2669 bp, Zea mays
  CDS (63)..(2423)
ccacggttccacgaacgttggcgcgcaagctcgtggtgtgagcggtcactgtctcccatcccatggctccggcgctgagcgggactctgggcgcgtcgtcggtggcggcgctgcggccctgcgcggggaggagggcgccgtccgccgcgagctcggttgcgccgcgcgggagcggggtggtgaggtgctccagagggctcaggtgggacgcccacagaagcagggggaggttgctcagggtgaggtgcgatgcggccgtcgcggagaagcccgccgaggaggaggcggctggggagaagttcgagtaccaggcggaggtgagccgcttaatggacttgatcgtccatagtctgtacagtcataaggaggtatttctccgggagcttgttagcaatgcgagtgatgcgctggataagctgaggttcctcggcgtcactgattcttctttgcttgctgatggcggcgagctagaaataagaattaagcctgaccttgatgctggaacgattactatcactgacactggtgttggtatgactaaagatgagctcaaggactgccttggtaccattgctcagagtggcacctcaaaatttctgaaggccctcaaggaaaacaaagaccttggggcggacaatggtctaattggtcagtttggtgttggattttactcagcttttcttgttgcagagaaggttgtggtgtccaccaagagcccaaaatcagataaacagtatgtgtgggaagctgtggctgacagtagctcttatgtcataaaggaagagactgatcctgagaaaatgcttactcgtggaactcagattaccctgtttctaagacctgatgataagtacgagtttgcggacccttcaaggattcaaggcttagtaaaaaattactctcagtttgtgtctttccccatatacacatggcaggagaaatcaagaactgttgaggttgaagaggatgaagagccgaaagaagttgaagaggcaacgaagggtgagaaaaagaagaagactattacagagaaatattgggattgggaactagccaatgagacaaaacccatatggatgagaaatccaaaggaaattgagaacaccgaatacaatgagttctataagaagacattcaatgagtttttggaccctcttgcccacactcacttcacaactgagggtgaggtggaattcaggagtgttctttatgttccaggcatggcgcctcttagtaatgaggagataatgaaccccaagaccaaaaatatccggctatatgtcaaaagagtcttcatctctgatgactttgatggtgaactgtttccaagatacttgagctttgtgaaaggtgtggtggattcaaatgaccttcccctcaatgtttctcgggagattcttcaagaaagtcgaattgtaagaattatgcgcaagcgacttgtcagaaagacctttgatatgattgaagagattgcggaaaaggaagataaggaggactataagaagttttgggagagctttggcaagtttgtcaagcttggttgcatcgaggacacagggaatcacaagcgccttgctccattgttgcgcttccactcttctaaaaacgagggagatttgataagtcttgatcaatatgtagagagcatgcctgaaagtcaaaaggcaatctactacatcgctacagatagtctccagagtgcaaagactgctcctttcctggaaaagctggtccagaaagatattgaagttctctaccttattgagccgatagatgaggttgccattcagaacttgcagacctacaaagagaagaaatttgtggatatcagcaaagaggatctggaattgggtgatgaagaagaagagactaaagaaaccaaacaggagttcactctcctatgtgattgggttaaacaacagcttggcgacaaggttgcgaaggtccaaatatcaaagcgtttaagttcatctccatgtgttctcgtatctggcaagttcggttggtccgccaatatggaaaggctcatgaaggctcaaacacttggtgacacatcaagtttggaattcatgaggggaagaaggatctttgaaatcaaccctgaccacccaattatcaaggatttgagcgctgcttgcaaaaatgagcccgaaagcacagaagccaggagggctgttgagctcctatacgaggctgctttaatctcgagtggatatactccggagagtccagcggagttgggtggcaagatctatgagatgatggcgattgccctcggcgggagatggggaaggtccgacatggaggaggccgaagcgtcgacgggtgaggccagcgcagaggcagactcatctgaagtcaccgtagcagaggtgattgagccctcggaagttagacccgagagcgatccgtggagggaccagtgagttctcccacgggcatccttaactccatatttagcagtgccggggataaaaactaagccatgggcaagaacatattgccgtggcaatttttttgtaggcttagactttgccggccaccagaatcttattgaggaggtagtggccttagaaaagaataataaagcatgaagactgatgattacatagcgaaattgtgctgtccctctcaataatatttataatgaaaagaacttatttctgcag

SEQ ID NO: 146 - DNA, 2521 bp, Sorghum bicolor
  CDS (138)..(2285)
caggaaacaaagcaagcaagcaagcatcgcacgaacgatccatccattcatcgcctctctctgtctctctttcagcaacaagaaagtctcgtaggtagagatcagagcaagcacaagcagaagcagggcaatcaatcatggcgtctgcggacgtgcacatggccggcggcggcgcggagacggagaccttcgcgttccaggccgagatcaaccagctgctctccctcatcatcaacactttctactccaacaaggagatcttcctcagggagctcatctccaacgcatcagatgcgcttgacaagatccggttcgagagcctgacggacaagtcgaagctggacgcgcagccggagctcttcatccggctggtcccagacaaggcaaccaagacgctgtccatcatcgactccggcgtggggatgaccaaatccgacctcgtcaacaacctgggcaccatcgcgcggtcaggcaccaaggagttcatggaggcgctggcggcgggcgccaccgacgtgtccatgatcggccagttcggggtcggcttctactccgcctacctcgtcgccgacaaggtcgtcgtcaccaccaagcacaacgacgacgaccagtacgtctgggagtctcaggccggtggctccttcaccgtcacgctcgacaccaccggggaacggcttggtcgcggcaccaagatcacgctgtttctcaaggacgatcagctcgagtacctcgaggagcgacgcctcaaggatctcgtcaagaagcactcggagttcatcagctaccccatctacctctggaccgagaagaccaccgagaaggagatcagcgacgacgaggatgacgaggacaagaaggagggcgacgtcgaggaggttgacgacgacgacggcgacaaggacgacaaggactccaagacgacgaagaagaagaagaaggtgaaggaggtgacgcacgagtgggtgcagatcaacaagcagaagcccatctggctgcgaaagcccgaggagatcacgcgcgaggagtacgcctccttctacaagtcgctgaccaacgactgggaggaccacctcgccgtgaagcacttcgccgtggaagggcagctggagttcaaggccatcctgttcgtgccccgccgcgcgccattcgacctcttcgacacccgcaagaagctcaacaacatcaagctctacgtccgccgcgtcttcatcatggacaactgcgaggagctcatcccggagtggctgggcttcgtcaagggcgtcgtcgactccgacgacctgccgctcaacatctcccgcgagacgctgcagcagaacaagatcctcaaggtgatccgcaagaacctcgtcaagaagtgcatcgagatgttcttcgagatcgccgagaacaaggacgactacgccaagttctacgacgccttctccaagaacatcaagctgggcatccatgaggactcgcagaaccgcgccaagctcgccgacctgctccgctaccactccaccaagagcggcgacgagatgacgagcctcaaggactacgtcacgcgcatgaaggaagggcagaaggacatctactacatcaccggcgagagcaagaaagccgtcgagaactcgccgttcctggagcggctcaagaagaaaggatacgaggtgctcttcatggtggacgccatcgacgagtacgccgtcgggcagctcaaggagtacgacggcaagaagctggtgtcggccaccaaggagggtctcaagctcgacgacgacgacgaggaggccaagaagcgccgggaggagcgcaagaagcagttcgaggatctctgcaaggtgatcaaggacatccttggtgaccgcgtcgagaaggtggtggtgtcggaccgcatcgtcgactcgccgtgctgcctcgtcaccggcgagtacggctggacggccaacatggagcggatcatgaaggcgcaggcgctgcgggacagcagcatgagcgcctacatgtcctccaagaagaccatggagatcaacccggacaacggcatcatggaggagctccggaaacgcgccgaggccgaccggaacgacaagtccgtcaaggacctcgtgctgctgctcttcgagacggcgctgctcacctccgggttcagcctcgacgaccccaacacgttcgccgcgaggatccataggatgctcaagctcggcctcaacattgacgaggatgctgctgccgacgaggacgctgacatgcctgcgcttgaagagggcgccgccgaggagagcaagatggaggaggtcgactgatgaggggtctgtccgtttgaggtagatccttcatccatcctgccaaaatcgatcgatcgatgagggtgatgcctctgctttgtgtgtctctgcgtgtgggtccatcaagtgtcactgttggtacagcaggtcacagtattcagtagtagtagcttaccatgtcttgtgtcttgttcgtgtcacatttcggatccgctgtgtcatgccaatgctgtggaacataatataataat

SEQ ID NO: 147 - DNA, 2396 bp, Oryza sativa
  CDS (78)..(2174)
ccaaaccctagccgcctctcgtttcttctcgtcctctccacgcccccgagatctcaggagcacaggaggaggaagccatggcgtcggagaccgagacgttcgccttccaggccgagatcaaccagctgctgtccctcatcatcaacaccttctactccaacaaggagatcttcctccgcgagctcatctccaactcctccgatgcattggataagattaggttcgagagcctcacggacaagagcaagctcgatgcgcagccggagctgttcatccacattgtccccgacaaggctagcaacaccctgtcgatcatcgacagtggtgtcggcatgaccaagtcggacctcgtcaacaacctcggtaccatcgccaggtcggggaccaaggagttcatggaggcgctcgctgctggtgctgatgtgtccatgattgggcagtttggtgtcgggttctactccgcctaccttgttgctgagagggttgttgtgaccaccaagcacaacgacgacgagcagtatgtgtgggagtcacaggccggtgggtccttcactgttacacgtgatacctctggtgagcagcttggacggggtactaagatcaccctctacctcaaggatgatcagctggaataccttgaggagcgtcgcctcaaggatctggtgaagaagcattctgagttcatcagctaccctatctccctatggactgagaagacaactgagaaggagatttctgatgatgaagacgaggaagagaagaaggatgctgaggagggaaaggttgaggatgttgatgaggagaaggaagagaaagagaagaaaaagaagaagatcaaggaagtctctcacgagtggaacgtgatgaacaagcagaaacccatttggttgaggaagccagaggagatcaccaaggaagagtacgctgctttctacaagagcttgacaaacgactgggaggaacatctggctgtcaagcacttctctgtggagggtcagcttgaattcaaggccatcctgtttgtaccaaagagagcgccatttgacctctttgacaccaggaagaagcaaaacaacatcaagctgtacgtacgccgggtgtttatcatggacaactgtgaggagttgatcccagagtggctcagctttgtcaagggcattgttgattctgaagaccttcccctcaacatctcacgtgagatgctccagcagaacaagatcctgaaggtgatccgcaagaaccttgtgaagaagtgcgtggagctcttctttgagatcgctgagaacaaggaagactacaacaagttctacgaggctttctccaagaatctcaagcttggcatccatgaggattccaccaacaggaccaagattgctgagctcctgaggtatcactccaccaagagtggtgatgagttgaccagcctcaaggactacgtaacccggatgaaggagggccagagtgagatctattacatcactggtgagagcaagaaggctgttgagaactcccccttcctcgagaagctgaagaagaagggttatgaggtcctgtacatggttgatgccattgatgagtacgctgttggtcagcttaaggagtttgaaggcaagaagctcgtctctgccaccaaggaaggtctgaagcttgatgagagtgaggacgagaagaagcggcaggaggaactcaaggagaagttcgagggtctgtgcaaggtgatcaaggaggtgctcggtgacaaggtggagaaggttgttgtctctgaccgtgtggtggactctccctgctgtctagtcactggggagtatggctggactgctaacatggagaggatcatgaaggcccaggctctgagggactccagcatggccggctacatgtctagcaagaagaccatggagatcaacccggagaatgccatcatggacgagctccgcaagcgtgccgatgcggacaagaatgacaagtccgtgaaggacctggtgatgctgctcttcgagactgccctgctgacctccggtttcagcttggaggaccccaacaccttcggcaccaggatccaccgcatgctcaagctcggcctgagcatcgacgaggacgagtccgccgaggctgacgccgacatgccgccgctggaggacgacgccggcgagagcaagatggaggaggtcgactaaacgtcatggacccatggatgccattctgtcccttctagttatccctctcctagttctcttctcatagctatctgactgctgctgttcgctttctttttggtacgttggatgcatcagttttgtctttgtcttagctcttaaacaatgcgtggtaccttgtcatactgtttgcgttgcaatgctactagccgaagtatatgccagcttcttattcaaaaa

SEQ ID NO: 148 - DNA, 7858 bp, Oryza sativa
  CDS (1108)..(1489),(1813)..(2684),(6105)..(6266),(6417)..(6658),(6911)..(7016),(7103)..(7297)
atattgttttaaaaaacctttccttttttattgtaaaacaataaaagtttaacattattggatccaagggatgtatcgacatatcgttatagagtttaaagtccacgcattttgacggaatagatttaagagacagttctcgatcgagtaactcctcaatttatatcatgtcagagtggatagatatggtttcaaagctttccttttcttattgtaaaccaataaaagtttacctttatatattttttccaactagctgctgcattttatcaataaatgtaaatttatttgtataatcagctgccagtacatactgggaagtggacaacgaacttaagcacccattcgttcgttttaggcggagcaagaatttaaattatggctttagtgccacgctgtactgtagtaggacactaggacagaactactgacagaatcgctctagaaccaaaatgcatggtttggtggcctactgttaattctagctgtagctagccttgcataattcaaccttattgatcgtccatgttttccggtgaattaaacccacatgcaaacgtagtaggttttttatctctctcggttcacaaatttggacccctgaattccgatcctctgtaataagctgagtagtttgtgcaaattacgtgaaagcctgtcgtttccgtggcccacatgaactggcccccatgcttgctgactcagactccgatcacttcgcccggccaatgctccgctataaaaccctccctttttttggcaaggagttcccaccgtgagatcgagatcgcctcctctctccgtttccttttatttcccgattcgctcggcgtctcggcggcgaccttgcgcgagcgcgcgatgcggtgaaaaaaaaatcatcgcccgcgacagagtacatctgtcccttccgcataaggcaacgtcgcttataaatactgccagcctcttcgttcgtttccatttttcctcgtccgctcgctctcgttcatgtacaaataggagggcgcatgcaccttgtttgccattagctctcgacgtagcctagagcgcaagcagcagcagcagctagattggttggttgccaatgacccggccatctccccgatgatggacggcgccgcgcctctgcttcccgagacgagccccgagagccgccagcaacgtgatccggagagggggaagaggcggacgccggtcctcccggccgtcgtcgcgtccgccgtggtccttctcggcctcgcggcgctcttcctggtgtatggatttcacgacggtggagacgggagggcggccgtactcgcgcccggcaccgtggaggtcgcggcctcgtcgtcccgcggcgtcgtggagggcgtctcggagaagtccaccaccccggcgctgcgcctcggcggcggcgcggtccgggactacgcctggaccaactcgatgctgtcctggcagcgcacggcgttccacttccagccccccaacaattggatgaacggtatgtatacacgttgccatcgttcccgtggtttcatctaggccgttggatctgtaatcgcacggctccgattcaccggttatacaatgttttctcgtttctaatcttgttccctttccgtttcttttccacggacgtctcgtgcgcatggccgtgctgctcgtctttttctcggcatctacagatccgaacggtaagttgctggcgctgattgtcaatgcacggcgcaatcttgtacttgtcacgcattgacatcgatgtcgcgagacgtgacactttttttttgcacgcactgaccgggccgtcgatggatcgatctgcaggtccactgtactacaagggatggtaccatctgttctaccaatggaacccggactcggccgtgtgggggaacatcacctggggccatgccgtgtcgcgcgatctcatccactggctgcacctgccgctcgccatggtgcccgaccactggtacgacatcaacggcgtctggaccggctcggcgacgcagctgcccgacggccggatcgtcatgctctacaccggcgccacggaggagtcggtgcaggtgcagaacctggccgagccggccgacccgaacgacccgctgctgcgggaatggagcaaggcggaggcgaacccggtgctggtgccgccgccgggcatcgggctgacggacttccgcgacccgacgacggcgtggcgcaacccggccgactcggcgtggcggatcaccatcgggtccaaggaccgcgaccacgcggggctggcgctcgtgtacaagacggaggacttcctgcactacgacctgctgcccacgctgctgcacgtcgtcaagggcaccggcatgtgggagtgcgtggacttgtacccggtgtccacctcgccggccgtcgaggacgggctcgagacgtccaccccgccggggcccggcgtgaagcacgtactcaaggccagcctcgacgacgacagaaacgactactacgccatcggcacctacgacggcgagaccgatacctggacgccggacaacgccgacatcgacgtcgggatcgggctccggtacgactacggcaagttctacgcgtccaagacgttctacgaccccgtcgggcggcgtcgcgtgctatgggggtggatcggcgagaccgacagcgagcgggctgacatactcaagggctgggcctcccttcaggtaacgtacattgatcgacaacccccataaccttggtttcatatttctgataggctatagaattagtagtagttacgtataaacaaactttttttatttaattttgacaatggattgaacgagacacggatagagatacgaacccgtcaaatttctttgtgaagcatcataactgaacataattacaaaaatataaaaataacaagttatattaatctcaaatgacgtaggaaaactattataaagctgtctgaaaagccatattgatctgtgatataattcattgcaaaactaattagtcttttttttttgcgatgacatgaacaagatacttaattaagatttttaggtaactgggtatgtactatctcaattggcacagaacgagttactattaaaatctgaaaagccgtactgatttggtataattcatatatattgtaattaatttaacttgccgtatacatccctttttcccaatcatgtactgtactccattaattactgtgtcaaaaacatttagctcatactatttgaatcgctagagcaaaaaagtaaagtgactaggacgatataaactcatggaaatccattaaaaccttatgaaaataacgcccctagctaagccagctagctgctagccagctggatatgatgatcatgctgatctggctagttaaccatggatggctagctaggacccggtcattatgtagttatacacttgcatataccatttctagaccacaattccgcccactaagatataatgcaaaacgtctttacctgtgcaccacgagaggcatgcaggcgtgcggctttcttgttgcgccggccggtcgatccagaagaaaacgtgcatgaacatagttggaccagtagtatatgcagtagtccaggtctgggcgggccccacggggatcacgtccttttttttattattttttgaaaaccggatcacgtccttctaccggtctacccaaacgagttgcacgatgccgacttgattaatcggtccgagtcacgcccgcccaaccaccagaggtagccgggcccggcgagatttgcaggctgccaatagactcgcggggatttgcatgcagcagcggcgccatgacatcggactggatcggccggcgttttctggtgcccgaccgtgacttgtctccggttggccgcgagagcacgagagccgtacgtctaagcaaactagttgtcaccacgtcttagtgtggagaagtattagtactctattaattagctaaggctagagttagattaatcctcaaattgcgaagggttttttttatgcgtccataacgtgtcttgcattggcgcatagctagagattagctaggacatttacttgacgaaagggggatttgagtaaatttctgatttgctagagtttggaattccaaacaggactattcaaaggggttgttccaacgaagcagcacgtggataatgacttgcttagcatcaggaaatttaataccctgacctgtcgctgcaatcgtgttgtttttttaataatccgtaatcatttgaataacttagtaatttcgcggtatatgtacatgtcattcttgtggcaagcgtgaaagtgagttcttgagtggccggttcgactcctaggggaattaacttcgtttttgagaaatttgttttacgttatttttggaactaaaatgtttggcaatttattttaatcgatgatgaaatcaatggtttttgtgaaatgaaaaaaaaaatccactcatagttattctaaagatgaaattgaggagttttcgatatttgtactatactataatataaaaaaggaaatcaacaaacgtctcctttctcagttggttaggcaagttgttgtgatgctaataggctacacaagtctaaccgtgttatctaagttgtaaagatacttgagatgtattttaaaaaatatatggaaatggtaattgagtgagtgtgttcaaacttgaacgcggtccactaggtttctaattctaaactttaccaactgcgcaaggtggagttatcgaaattaggtgatagattaataagtaaatgcactttcttggtggtaaagatacttgagatgtattttaaaaaatatatggaaagggtaattgagtgagtgtgttcaaactcgaacgcggtccactaggtttctaattctaaactttaccaactgcgctaggtggagttatcgaaattaggtgatagattaataagtaaatgcactttcttggtggccagttaagttgtaaaaatacttgagatgcatttgaaaaaaaaagcaccatggtggaaagggtggctgttggcgagtgttttaaaactcgaacgcggcccgctaggttcctaattctaacctttgccaactgcgctaggtggagttatcaaaattaggtgatacacaaatttataaatgcactttcttggtgaccagttatgcaaatacactagacttctattaaaaaattatggtggaaaaaggtgagcatgataatttttatattaaacgcaaacgaaaacaagggtgaaaaggtgagtgtgctaaaactcaaacacaataaacaagggtgaaaaggtgagctgctaaaactcgaacacggtccgctagtctgtctaactatagactttgccaactacactaggcagggcttcttaaaaaagcagtggactttgagtaaatatacttccttggttagatggccgggtatgaaaatatcctagaattgtatcaaaaagaatttgggtgggaagtgagcgtgttaagactcgaacccgggctgttatattttacaactctactatttgccattggcgctaggcgagtttatcagaattaggtgataggttaaccaataaatgcattggccttttgttaaattgcgaactatacaaacttactaaaattgcatctttttttaatcatgctaaaattatgtatttttatctgaatgactgtaaaaacttgctaaaattgtatatttttaaaatcatgctacaattttgtattttgtctgaatgactataaaaaaaactaaactgctactaccatctctaaataaatgtaattttaggtgatccactagaccattttaatactagtttatcttttttttttcgttttctccaccacaaggacatcgtagttttttaatctcttgcttaataatatatctttaactagttaaaactatacatttttagagtcggagggagtagatccttaactgtctctccttcaatcattcatgtcattgtccctttttctttaaatcttatttttttcctgttttaaattgttgttgaattcaatgtgcccttgatgggccttgaccgaggcccatccaaacaaggcatttccctttatttaaattaaccttttattattattattatttgcagtcaattccgaggacagttatgctggacacgaagactggcagcaacctgctccagtggccggtggtggaggtggagaacctccgtatgcgcggcaagagcttcgacggcctcgacgtctctcccggctccgtcgtgccgttggacgtcggcaaagcaacacaggtacgtacgcgtgattttgacacatgaacacaaaatgtgtcatacatttataaaaaaaaagtgtgccatacacatacacaacaactgctatatatccgacccgagaaactgacgtgcaagtgtggttctggtgtgcgtgcggttgtacagctggacatcgaggccgtgttcgaggtggacacttcggcagccgacggtgtcgtcacggaggctggagcagcagcatacagctgcggcacgggcggcggtgcggttggccgtggcttgatgggcccgttcgggcttctcgtgctggccgatgatcagttgtcggagcggacggctgtcttcttctacctggtcaagggagtcgacggcaaccttacaaccttcttctgccaagacgagctcaggtgtgtgtggtacacattttccagtatatgcgtgcatgtcttcctctgtgtgcacatatttttgcaaccaaatattcacacttgatcttgttattagaggatgtattttttttcgatacttcaatttgtggacagaggatgtgtgctgtcgtgtgtagaactccttgtgtatatataaaggaggcttaaattttgctttaatcgagtcaagatgtaaattttaatgcattttaaatcttgtttttttttcaggtcatcaaaagcaaacgatctagttaagagagtctatggcagcttggtacctgtgctagatggcgaaaacctgtcaataaggattttggtaagtctttctagcaatgttgagtacatgcatattcatatgccacaacgcatatattttgatacgtcgtaacctaactctttgtgtgcaatttctttcaataggttgatcactccatagttgagggcttcgctcaaggagggaggacatgcattacctcgcgtgtgtatcccaccaaagccatctacgagtcggccaaaatctttcttttcaacaatgccacaaatgttagagtcactgccaaatcgctaaagatttgggagctgaactctgcttacatccgtccatatgtagactagatcatttttaatgtaatgggaatgaatgatttgtctacatttgttagttatgtttttataggctaatttatcttttttgcttccttctttatgtcaaactacaactatgacatattactagcaactgaaataaaacataatcaatcatattgttttgccacaattttgttattgtgtgtgcgcatgcgcacacgtacgtgcacatgtgcgtatgctatcactctacccctgatgttattattagccatcaccgtaatgttgtcgtaagccaattgtgtcatgtttatcctacataaacaatatacgactttgcgaacattcctcttcaacaatgccacaaatttagggccactagaaaatcactcaagattttggagctaaactctacttaagttcatcaatatataaactacatccttttaaatgcaatggtagtgtggtatgtttagattcattagttgtatctctatagtcaaatttgtttgtcttcatctttctacctatcaaaccacaactgaaaatttttagtcaaatatgtttgtttgctttcttcttcttatc

SEQ ID NO: 149 - DNA, 2924 bp, Zea mays
  CDS (89)..(2821)
ccacgcgtccggctcggtcgactactggctagcttgtttcagtcgtccgatctgatctacagaaaaagcaggggcagggcagctagccatgattcagatgaacatgaagcagcctctcgtgctgcccgcgcaccggggcaatgtcatcggctcgcgcctggcgtcgtcgccctctccggtggcggcggcggcggcggcggccagcaggcggaggggcgtcgtgtcctccccccgctcccggctccagcgccacatgcggctgccgaggatcagctgcagcgccaccgaggaggccagcggcgccgtgtcggccgtcaccgtggagaagatgctgacggtgacggcctcggtgcaggcggcgccggccatcggtcagatgtacttccagcgcgccctcgacgacgccggcgacttcttcggcaagacgctgctgatggaactcgtcagctccgaggtcgacgcaaagacgggtctggagaagccgcgggtgacggcgttcgctcacaagacgctgcgggagggccactacgaggcggagttcaaggtgccggcgtcgttcgggcccgtgggcgcggtgctgctggagaacgagcaccacaaggagatcttcatcagggagatcaagctcgtcacgggcagcgacagcagcaccgccgtcaccttcggctgcaactcctgggtgcactccaagttcgacaacccggagaagcgcatcttcttcaccctcaagtcctacctgccgtccgacacgcccaagggcctggaggacctgaggaagaaggacctgcaggcgcttcggggcgacggccacggcgagcgcaaggcgtccgagcgcgtctacgactacgacgtgtacaacgacctgggcgacccggacaagaaccccgcccaccagcggcccgtgctgggcggcagcaagcggtacccgtacccgcgccgctgccgcaccggtcgccccaggaccaggaaggaccccgaggcggaggtgcgccatgggcacaactacgtgccccgcgacgagcagttctcggaggtcaagcagctcacgttcggggccacgacgctgcgctcgggcctgcacgcgctgctcccggccatcaggccgatgctcatcaagagggagctgcgcttcccgcacttcccggccatcgacgacctctacagcgacggcatcccgctgccggcgcagaccgggttgggcgccatccgcagcatcgtcccgcgcgtggtcaagctggtggaggacaccaccgagcacgtcctccgcttcgagctgccggacatgatagagagagaccgcttctcgtggttcaaagacgaggagttcgcgaggcagacgatcgcggggctcaacccgctgtgcatccagctcctgacggagttccccatcaggagcaagctggacccggaggtgtacggcccggcggagtccgccatcaccaaggagatcctggagaagcacatgagcggcggcgccgccatgaccgtggagcaggcgctcgcggcgaagcgtctgttcatcctggactaccacgacgtgttcctgccctacgtgcacagggtgcgcgagctgccggacacgacgctctacggctcccgcaccgtcttcttcctcacggacctgggcacgctgatgccgctggccatcgagctggtgcggcccaaatcgccgacgcagccgcagtggaagcgggtgttcacgcacgggcccgacgccaccgacgcctggctgtggaagcttgccaaggcgcacgtggtgacccacgacacggggtaccaccagctggtgagccactggctgcgcatgcactgctgcgtggagccctacatcattgccgcgaaccggcagctcagccggctgcacccggtgtaccgcctcctgcacccgcacttccgctacaccatggagatcaacgcgctggccagggaggcgctcatcaacgccgacggcatcatcgaggagtccttctggccgggcaggtacgccgtcgagctcagctcagcggcgtacggcgccacgtggcagttcgacacggaggcgctgcccaacgacctcgtcaagcgtgggctcgccgtgcgccgggacgacggcgagctggagctcaccatcaaggactacccctacgcgcacgacgggctcatggtctggaacaccataaggcagtgggcggccgactacgtcaacgtctactacaagtccgacgaggccgtcgccgccgaccccgagctgaaggcgttctgggacgaggtgcgcaacgtgggccacggcgacaagaaggacgagccgtggtggcccgtgctcgacacccgcgacagcctcgcggagacgctcaccaccatcatgtgggtcacctccggccaccactcggcggtcaacttcgggcagtaccacttcggcggatacttcccgaaccgcccgaccaccatccggaagagcatgcccgtggaggaggaggcgggccgggacgaagagatgaagaagttcctgaagcagccggagacgaccctgctggacatgctgccgacgcagatgcaggccatcagggtgatgacgacgctggacatcctctcgtcgcactcgcccgacgaggagtacatgggagagttggcggagccgtcgtggctggaggagcccatggtgaaggcggcgttcgagaagttcggcggcaggatgaaggagatcgagggattcatcgacgagtgcaacaacaacccggagctcaggaaccggtgcggagcagggatcgtgccgtacgaactgctcaagcccttctccaagccgggagtcaccgggaggggcatccccaacagcatctccatttgacccgtccgtcctctccatccaatgggggtttgccttattgcgtgcacgctagctagctgcttggaaataaaaataattaaaataaaaaaaaaaaaaaaag

SEQ ID NO: 150 - DNA, 1814 bp, Zea mays
  CDS (111)..(1556)
ccacgcgtccgagtccttcttcgtaagccttcaaaccgacgaatttgagcaactgcacccagagcgcgatccattgccggggaagaagcaacttgttgcgagcctcctctatggcgagctccgaccatggttccaccaccgcccccaaggacgtgcctggcagctacggcctgccgctggtgggcgccgtgcgcgaccgcctcgacttctactacttccaggggcaggacaagtacttcgagtcccgcgtggagcgctacggctccaccgtggtgcgcatgaacgtgccgccgggccccttcatggcgcgcgacccgcgggtggtggcggtcctggacgccaagagcttccccgtgctcttcgacatggacaaggtggagaagaaggacctgttcacgggcacctacatgccgtccacctccctcaccggcggctaccgcgtctgctcgtacctggacccctccgagcccacccacaccaaggtgaagcagctgctcttctccctcctgctctcccgcaaggacgacgtgatccccaccttccgctccaacttctcctcgctcctcgccaccgtggaggcggagctggccaagggcggcaaggccgagttcaacaagctcaacgacgtcacctccttcgacttcatcggcgaggcctacttcggcgtgcgcccctcggcgaccgacctcggcaagggcgggccgaccaaggcggccaagtggctcatctggcagctccacccgctggtcacgctcggcctccccatggtcctggaggagccgctgctccacacgttccacctcccgcctttcctcgtcaagggcgactacagggcgctgtacaagtacttctccacggtggcgaagcaggcgctggacaccgccgagggcctgggcctgtcgcgcgaggaggcctgccacaacctcctcttcgccaccaccttcaacagctacggcggcctcaaggtgctgttcccgggcctgctggccaacgtggccagcggcggcgagaagctccacgagcggctggtggccgagatccgcggcgccgtggccgacgccggcggcaaggtcaccctcgcggcggtggagaggatggagctggccaagtcggtggtgtgggagtcgctgcgcctggacccgcccgtcaagttccagtacgggcacgccaagaaggacctgctggtggagagccacgacgcggtgttccaggtgaggaagggcgagatgctgttcggctaccagccgtgcgccaccaaggacccccgcgtgttcggcgacaccgccggggacttcgtgcccgaccgcttcctcggcgaggagggcagcaagctgctgcagtacgtgtactggtccaacggccgtgagaccgagaaccccagcgtcgacaacaagcagtgccccgggaagaacttcgtggtgctggtcggcaggctcctcctcgtcgagctcttcctccgctacgacacattcaccgccgaggtcggcaaggagctgctcggcaccagcgtcatcttcaccggtgtcacgaaagctacctccggtccgggcagcgagtaaaccgcccggccggcgcgcgtcgttggatatatgatgagtggacgtgacagagtgtcccattatttcttaatttcgtcattttcctccttccttctaataagacttctctctcaccctcggccccaccttcacgtgtgattggaggtgtttgtcgcttttgtaataattataatgcaggatggcatgttgcataaattgctccccaaaaaaaaatcttatctttcacaaaaaaaaaaaaaaaaaaaaaaaaaaggc

SEQ ID NO: 151 - DNA, 2419 bp, Zea mays
  CDS (139)..(1911)
gaattcccgggtcgacccacgcgtccgcccacgcgtccggcatcaccacaccccgtctccaccccgtacaaatccaaaagagggcgaggagggaaacagatcggctggcggcaatcggtagccggcttggctggcacgatgggcggcgaggccgagggcggggagcggcggctggggcgggtgctgagctttgggatcccggacacggcgctggggctagtgatggggtacgtggaggatccctgggaccgcgacgccatctcgctggtgtgccgacactggtgccgcgtcgacgcgctcagccgcaagcacgtcacggtcgccatggcctactccacaacacccgagcgcctgttccggcgcttcccgtgcctcgagtcactcaagctcaaagcgaagccccgcgcgtccatgttcaacctcatctccgacgactggggcgggtctgcgtcgccttggatccgacagctctcggccaccttccacttcctcaagaagctccacctgcgcaggatgatagtatccaacgaagatatcaacatccttgtgcgtgccaaggcgcacatgctcgtcgcgctgaagctcgaccgctgctccggcttctccactccctccatcgcactcgtcgcccgttcctgcaggaaactggaaacacttttcctggaagaaagcacaattgatgagaaagaaaatgatgagtggatccgtgagcttgctacgagcaattctgttcttgagacactgaatttctttctaacagatctcagggcatccccagagtatcttaccctccttgtgcgcaactgtcaacgattgaaaactctgaagattagtgaatgtttcatgcccgatctggtcagtttgttccgaactgcacaaacactacaagagttcgctggtggttcctttgaagagcagggtcaacctgtggcaagtagaaattatgagaactactattttcctccttcactgcaccacttgagtttgctctacatgggaacaaatgatatgcaaatactgtttccatatgctactgcacttaagaagttagaccttcagtttacattcctttccacagaggatcattgtcagatagttcaacgctgctccaatctggaaaccttagaggtgagggatgtcataggggatcgtggactacaagttgttgcacagacctgcaagaaattgcataggctcagagtagagagaggagatgatgatcaaggaggtcttgaggatgaacaaggtaggatttcacaggtggggttgatggctatagcccaaggctgccctgagttgacatactgggcgatacatgtatcagacattacaaatgcagctttagaggcagttggtacatgcagcaaaaatcttaatgacttccgccttgtcctccttgatagagaagcacatataaccgaattgccactggacaatggggttcgtgctttgcttagaggttgcaccaaactacggaggtttgcattttatgtgagacctggggccctatctgatgttggtcttggctatgttggagaatttagtaagagtattcgttatatgttgcttggtaatgttggtgaatctgataatggaatcatacaattatcaaaaggctgcccaagcttgcaaaaactggaggtgaggggttgtctctttagtgagcatgctttagctttggctgcactacagcttaagtcactgaggtatctgtgggtacaaggattcaggtcatctccaactggaactgatattatggcaatggtacgccccttctggaacattgagtatattgttccagatcaagatgaaccttgcccagagcataagagacagattctggcatactactcccttgctggcaggaggacagattgtcctccatcagtaactctgctttacccggcattttgagtgtagatacttgctttttgccagactgaatctcatggtactaagttccattggtcccactatctgtgaagtaaatggtccctgttcttccaattgatgaggacatgcagacgttccagtgcaaagaaccccaaaggtaagctttaagcaggacggccagctctgaactgaggctagctgagaacaatcatgaatacctgaaggcagcacttatgtcagcttggcctagctgtccagtatgggcatgtaagctttaccatcttttgtagttttggagaaacaattttgcaataactacccttgtttagtgtatattatcgattttcgttcatatgctgttgtattgttgtattgaacaattatgtcaattaattagtctacactctacagtctaacttgctgtgattcgatgaatagtgtttatatcacccacaaaaaaaaaaaaaaaaaaaaaaaaaaaaaaaaaaaaaaaaaaaaaaaaaaaaaaaaaaaaaagggcggccgc

SEQ ID NO: 152 - DNA, 2178 bp, Zea mays
  CDS (130)..(1923)
attcggctcgagaccacacctgcagaaatcacagcggcaggtgcagcaaaaatctccatgcccccgctcggctagatctccgacgagccggccccgcgctgtagcagattcgctccccgatcccgaccgatgggcggtgaggtgccggagccgcgccggctgagccgcgcgctcagcttcggctgcggcggcgtccccgaggaggcgctgcacctcgtgttcggctacatggacgacccgcgagaccgggaggcggcctcgctcgtgtgccgcctctggcaccgcatcgacgcgctctcgcgcaagcacgtcaccgtgggcttctgctacgccgtggagcccgcgcggctgctcgccaggttcccgcggctcgagtcgctcgcgctcaaggggaggccacgcgccgccatgtacgggctcatccccgaagactttggcgcctacgcggcgccctgggtcgccgagctcgccgcgccccttgactgcctcaaggcgctccacctgcgtcgcatgaccgtcaccgacgaggacatcgccgtgctcgtccacgcgcgcggccacatgctacaggcgctcaagctcgacaagtgctccggcttctcaacagacgccctccgcctcgtcgcgcgctcctgcaggtctctgagaaccttgttcctggaagaatgtataattgaggatgaagggagtgaatggctccatgaactcgctgtcaacaattctgttctggtgacactgaacttttacatgacagaactcaaagtggagcctgctgatctggagcttcttgcaaagaactgtaaatcattgatttctttgaagatgggtgactgtgatctttcagatctgattgggtttttccaaacctccaaagcattgcaagaattcgccggtggtgccttttttgaagttggagagtacaccaagtacgaaaaggtcattttcccacctaggctatgcttcttagggggtcttaccttcatgggtaaaaacgagatgccagttatctttccgtattccacaatgcttaagaaactggacttgcagttcactttcctcaccactgaagaccactgtcagcttattgctaaatgccccaacctaagtgttctcgaggtgaggaatgtgattggggatagaggactagaagttgttgctgctacatgcaagaagctacgaaggctcagaattgagcgtggcgacgatgatcctggccaagaagagcagggaggagtctctcagataggtttgacagccgtagccgttggctgccgcgaactagagtacatagctgcctatgtatctgatatcacaaatggggcgctggaatccattggcactttctgcaagaatctctatgatttccggcttgttctacttgacaaacagaagaagataacagacctgccacttgacaacggcgtccgtgccctactgaggaactgcgtcaaacttcggaggtttgccttctacctgagaccgggagggctttcagacgtaggcctcggttacattggactatacagtgggaacatccaatacatgctgctcggcaacgttggtgaatctgacaacggattgatccagtttgcaacgggatgcaccaacctgcggaagctcgagctgaggggctgctgcttcagcgagcgagctctggcagtggccgtgctccagatgccctcgctgaggtacatatgggtgcaggggtacagagcctctcgaacgggccaggacctcatgctcatggccaggccgtactggaacattgaattcgcgcctcccattcccgagagcgcttatcgggtgatggcagatggacagccttgtgttgacacccatgcccaggtccttgcgtattactcccttgctggaaggaggccggactgccctcagtggctggtgactttgcaccctgcgtcactgtaaatacgtcaagctgtcccgagtgtggtttttgtaccagctgcttgtgtaccgtaataaactctagtactgtagtggtggaggcgtagtgcaataaagttgcagttgttgcttgtactagtgaatctaatcctaggaggttgttgccctgtgctttcttttccccggaattgtatctttgctccactgtaaatatcagaaatggcctgtgctagatgagttgaataaaaaaaaaaaaaaaaaaaaaaaaaaagg

SEQ ID NO: 153 - DNA, 2743 bp, Zea mays
  CDS (389)..(2368)
attcggctcgagctcctaacctgtcgagctgcccacagcccgtacctacctgcccccagtccccgccgccccgcctgcccgacccgcggcttatccaccacgtccaccgctgggctggatcgatcgggaccggggtcgcgccgccgccgctgccctccgcactcgcgggatcctgttcctaccatgcagcagcgctgcgcccttgcccgaccgcgccggcccgccgaaccgcgcgttccgctccccgacgatcactccctcgtcgccgtcttctccttcctcttcatccccacctaaatcaacctcctcgccgcgaaattctgctacaatttcttcatcttcccttgccgccgggagcggacggatcgccgcttcctcggccggcgggatgagccgggaggcgcagaaactcgactgcaccgccgccggcggcgggatcggggtcctgtcgctggacctgctgggccaggtgctggaacacctgcgggagccccgggaccgcaagacgtgccgcctcgtcagccgcgccttcgagcgcgccgaggccgcgcaccgccgcgcgcttcgggtgctccgacgcgagccgctcccgcgcctgctccgcgcgttcccggcgctcgagcggctcgacctctccgcctgcgcctcgctcgacgacgcctccctcgccgcggccgtcgccgacgccggcggggggctcgccggcctccgcagcgtgtgcctcgcgcgggccaatggtgtcggctggcgcggcctcgaggcgctcgtcgcggcctgccccaagctggcggccgtcgacctgtcgcactgcgtcagcgccggggaccgcgaggccgccgcgttggcggcggcgtccgagcttagggacctgaggctggacaaatgccttgccgtcaccgacatggggctcgccaaggtggctgttgggtgccccaagctggagaagctcagcctcaagtggtgccgtgagatctctgacattggaattgatctgttggccaagaagtgccctgagctccgcagcctcaacatatcctacctcaaggtgggcaatggatcccttggatcaatttcgtcacttgagaggcttgaggaattggcaatggtttgttgttcaggtatagatgacgaaggcttggaattgctgagcaaggggagcgattcgctgcagagtgttgatgtgtcaagatgtgatcatgtgacttccgaggggttagcttcactcatagatggtcgcaattttcttcagaagttatatgctgcagattgtttgcatgagataggacagcgttttctatccaagttggcaagactgaaggaaaccttgacgttgctgaaactcgacggtcttgaggtctcggactctcttcttcaagccattggtgaaagctgtaacaaattggttgagattgggcttagcaaatgcagtggtgttacagatggaggaatctcatctcttgtagctcggtgtagtgacctaagaacaattgatctcacatgctgcaatctcattaccaacaatgcgcttgattcaatagctgacaactgtaagatgcttgaatgtttgcggttggaatcatgctctttgataaatgagaagggactaaagcgaattgcaacttgttgccccaaccttaaggagatagacctcactgactgcggagtggatgacgcagcattgcagcacttggctaaatgctctgaattgcgaatattgaaattaggcctatgctcaagtatttctgacagaggcattgcatttatcagttctaattgtggaaagctcgtggagcttgatctctaccggtgcaactctattactgatgatggattggcagctttagcaaatggatgcaagaggattaagttactgaacttgtgttactgcaacaagatcactgatactggtttaggtcacttaggctccctggaggagctcacaaaccttgaactgaggtgcttggtccgcgttacaggcattgggatctcctcagttgcaatcggatgcaagaacctgatagagctggacttgaaacgatgctattcggttgatgacgctggactgtgggcccttgctcgttatgctttgaaccttagacagcttacgatttcgtactgccaagtcacggggttgggcctgtgccacctgctgagctccctgcgatgcctccaggacattaagatggtgcacctctcatgggtatcaatagaagggtttgagatggctctgcgagcagcctgcgggaggctgaagaagctgaagatgctctgcgggctgaagaccgtgctctcccctgagctcctccagatgctgcaggcttgtggctgccgaataagatgggtcaacaagcctcttgtctacaaggactagacagactcgtgttcctcattgtgtgtgcagtgtcagcatcagcatgtattgtcaagatcttgcaggtttgccctggctcacgttgtgagtccgcaataatcgttgggggcgtaagctcccgtccccaagatgtggttatggtgcctttggggcacttcttgcgccatttgtcactctctgctccggtgtatctgtgtatgcaaacggaggcaccggtaatgttcatgtgtatatagcgtgcagtagaatgatcccattttatgggattagttagtgtgtaattgttacctcatttcgcatgattcgaatcttgagatgaaagaatcataaggggtatgatcgatgcattgcattcaaaaaaaaaaaaaaagg

SEQ ID NO: 154 - DNA, 1291 bp, Zea mays
  CDS (61)..(1011)
ggcctgccctgtcctgccttgttaagcaacacagcgagacatcacgagagctagagagagatggcggccacggtttcctccttcccggtggtgaacatggagaagctggagacagaggagagggccacggccatggaggtcatccgcgacggctgcgagaactggggcttcttcgagctgctgaaccacggcatctcgcacgagctgatggacgaggtggagcggctgaccaaggcgcactacgccaccttccgggaggccaagttccaggagttcgcggcccggacgctggaggccggcgagaagggcgccgacgtcaaggacgtggactgggagagcaccttcttcgtccgccacctcccggcctccaacctcgccgacctccccgacgtcgacgaccgctacaggcaggtgatggagcagttcgcatcggagatccggaagctgtcggagaggctgctggacctgctgtgcgagaacctcggcctggagcccgggtacctgaaggcggccttcgccgggtcggacggcccgacgttcggcaccaaggtgagcgcgtacccgccgtgcccgcgcccggacctcgtcgacggcctccgcgcgcacaccgacgccggcggcatcgtgctgctgttccaggacgaccaggtgagcggcctgcagctgctcaggggcggggagtgggtggacgtgccgcccatgcgccacgccatcgtcgccaacgtcggcgaccagctggaggtcatcaccaacgggcggtacaagagcgtcatgcaccgcgtgctcacgcgccccgacggcaaccgcatgtccgtcgcgtccttctacaacccgggcgccgacgccgtcatcttcccggcccccgcgctcgtcggcgccgccgaggaggaccgcgccgaggccgcgtacccgagcttcgtgttcgaggactacatgaacctgtacgtgcgccacaagttcgaggccaaggagcccaggttcgaggccatgaagtcggccatcgccaccgcgtgagcaaagactgacttccgctcccggcttccttcgtggcgtcaagccttgaggcttgaacgaacaacgtacgtccatgtgcttatagtggcacagttatcgcgtggaacggcctaatgtatttcggttgcctcagatcgatctatatgtgcgtatacattatgtactgaaaagtgtgtagcgtctggttaatgtacgagcagtgtgtatgtgaccaggacccggtgtgtagttgctactactaccatatccggtgaatgatcaaaccttttggtgtatt

SEQ ID NO: 155 - DNA, 1485 bp, Oryza sativa
  CDS (2)..(1465)
gatggtgagccaagtggtcgccgaggagaagccgcagctgctgtccaagaaggccgggtgcaacagccacggccaggactcgtcctacttcctggggtggcaggagtacgagaaaaacccgttcgaccccgtctccaacccttccggcatcatccagatgggcctcgccgagaaccagctgtcgttcgacctgcttgaggagtggctggagaagaacccccacgcgctcggcctccggcgagagggcggcggcgcctccgtcttccgcgagctcgcgctgttccaggactaccacggcctcccggctttcaaaaatgcattggcgcggttcatgtcggagcagagagggtacaaggtggtgttcgaccccagcaacatcgtgctcaacgccggcgccacctcggctaacgaggcgctcatgttctgcctcgccgaccacggcgacgccttcttcatccccaccccatactacccagggttcgaccgcgacctcaagtggcgcaccggcgcggagatcgtacccgtgcactgcgcgagcgcgaacgggttccgggtgacgcgcgccgcgctggacgacgcgtaccgccgcgcgcagaagcgccggctgcgcgtcaagggggtgctgatcaccaacccgtccaacccgctcggcaccgcgtcgccgcgcgccgacctcgagacgatcgtcgacttcgtcgccgccaagggcatccacctcatcagcgacgagatctacgccggcacggcgttcgccgagccgcccgcgggcttcgtcagcgcgctcgaggtcgtggccgggcgcgacggcggcggcgctggcgtgtccgaccgcgtgcacgtcgtgtacagcctgtccaaggacctcggcctcccggggttccgcgtcggcgccatctactccgccaacgccgccgtcgtgtccgcggcgaccaagatgtccagcttcggcctcgtgtcgtcccagacgcagtacctcctcgcggcgctgctcggcgacagggacttcacccggagctacgtcgcggagaacaagcggcggatcaaggagcggcacgaccagctcgtggacgggctcagggagatcggcattgggtgcctgcccagcaacgccggcctcttctgctgggtggacatgagccacctgatgcggagccggtcgttcgccggcgagatggagctctggaagaaggtggtgttcgaggtcggcctcaacatctcccccgggtcgtcgtgccactgccgcgagcccggctggttccgcgtctgcttcgccaacatgtcggccaagaccctcgacgtcgccatgcagcgcctcaggtcgttcgtcgactccgccaccggcggcggcgacaacgccgccctccgccgcgccgccgtccccgtcaggagcgtcagctgcccgctcgccatcaagtgggcgctccgcctcaccccgtccatcgccgaccggaaggccgagagataatcgccaagaacaaaaccaca

SEQ ID NO: 156 - DNA, 1428 bp, Zea mays
  CDS (128)..(1240)
cccacgcgtccgactcgccattcctaagtcctaactacctccaaccccgcacgcacaactggccgcgccaaggcaaagctagaagaagacaacgcaaagggagaggacagaggaggagcagaggacgatgggcagcggcggcgctaacactgcccccctcctcaccccctacaagatgggaaaattcgatgttacccacagggtagtcctcgcaccactgacgagacagcggtcctacggcaacgttccccagcctcatgccatactgtactatcagcagagggcgactaaaggaggtcttctgatcgctgaggccacgggggtttcagacactgctcaagggtacaaggacactcctggcatttggacccatgagcaagtcgaagcatggaagccgatcgtagacggggttcaccagaaaggagggatatttttctgtcagatttggcacgtagggagagtctccaattccacttttcagcctaatgggcaggctccaatttcaagcaccgataagccactaaagcctcaagtgagagccaatggtatagacgtggctactttcgcagttcctagacgcttagagactgatgaaatccctttggtcgtcaatgatttcagggtagctgctcgaaatgcgattgaagctggatttgatggtgtcgaaatccatggagctcacggttacctgattgatcagtttctaaaggacggggtcaacgaccgcacagacaaatacggtggcagtctggagaaccgctgccggtttgcactggaagtaactcaagctgtggtcgacgaaattggagctgacaaggtcgggataaggctgtcaccattcgctagctactcggaggcgccggactcagacccggaagctctgggcatgtacatggcgaacgcgctgaacgagttcgggattctctactgccacatggtggagccgcggatggtgaaactcggtgaaaagttcgaaaccccctacagccttcgcccgataagggacgctttcaggggaacgttcatcgttgccggcggctacggcagggaggatgggaatcgagcgatctccactgggtatgctgatttggtcgcgttcgggcgcttgttcttggctaatcctgacctgcctcggaggtttgaagtagacgctccccttaacaagtacaacagagacacgttttacatccctgatccggttgttggatacactgactacccatttctttcgtcagatgtataaatgttctcttttcagcaatctgcttttttagattgagtagtaactggttggtgtaccagtaaaatagtagaggaataaaccattggtctgaatgcctcattctcatatatatggacaaaagcaatatgatcgttgtaattgtgcctcaaatcttatagttgtaaaaaatattgtgaagaaaaaaa

SEQ ID NO: 157 - DNA, 1324 bp, Zea mays
  CDS (166)..(1242)
gctccccgtttccctctccaactccaatccatggcctccacggatcgctccacgccggcggaggacgagcaacagcagaagcgcccgtctctcttctcgccgtaccagatgccccgcttccgcctcacccaccggtgagcctccatcgcggtggtgctggcgccgatgaccaggtgcagggcgcccgacgcgatcccaggccccgcgctcgcggagtactacgcgcagcggtccacggagggcggcttgctcatctccgagggcaccatcatctcgccgtccggccctgggttccctcgtgtccctgggatatacaatcaagaacagactgatgcatggagaaaggtggttgatgctgttcatgccaagggagctatctttttctgccaactatggcatgtaggccgagcttctcaccaagtatatcagccgggtgctgctgctccgatatcctcaactgataagccaatatcatcaagatggaggatactgatgcccgatggatcctatggcaagtatccaactccgaggcgcctagccacatccgagataccagaaattgttgagcaataccgtcaagcagccgtaaacgccatcaaagcaggtttcgatggcatcgagatccatggcgcccatggctacctcatcgatcagttcctcaagggcggtatcaacgaccggactgacgagtacggtggctcactctccaaccgttgccggttcctcctggaggtgacccgagccgtggtctctgcgataggggcagaccgcgtcgcggtccgagtgtccccggccatcgaccatctcgacgcctacgactccaaccccctgcagctcggcctggccgtggtggagcgtctcaacgctctccagcaggaggccgggcggctggcctacctccacgtgacgcagccacggtacacggcgtacgggcagacagagtctggccagcacgggagtgccgaggaggagagccggctgatgcgtgccgtgcgaggtgcctaccgtggcacgttcatgtgcagcggtgggtacacgcgggagctcggggtcgaggccatcgagtccggggacgctgacctggtgtcctacgggcggctgttcatcgctaatcccgacctggtggagcggtttcggcgcgacgccccgctgaacaaatacgtgcgcaagacgttctacacgccggaccccgtcgtcggttacacggactacacattcctcggccagcctaaggcacgcatgtgatttgattattagtgcgttgccgtaattataagaggcggagtattgtttgtatgttgtgacttgagaaaacaagcaaaaa

SEQ ID NO: 158 - DNA, 1376 bp, Zea mays
  CDS (92)..(1210)
cccacgcgtccggcgagcaacagagcagaagcaaagcgcagagctagcaagtgaccgaccgagagcaaataggcaaggcaacgcaggcaagatggtgcagcaagccgcgaaggaggtgatcccgctgctgacgccttacaagatggggcagttcgagctctctcaccgggtggtgctggcgccgctgacgaggtgccgctcctacggcaacgtgccgcagccacacgccgccgtgtactactcgcaacgcgccaccaggggtggcctgctcatcgcggaggccacgggggtgtcggccaccgcgcaggggttcccggagtctcctggcatctggacgcaggagcaggtcgaggcgtggaagcccatcgtcgacgccgtccaccgcaagggcgccatcttcgtctgccagatctggcatgtgggcagggtctccaccaacgagctccagcccaacggcgacgcgcctatctcgagcacggacaagcagatctcccccgacgccaagtccggaacggcgtactcgaagccgcgccggctgcggaccgacgaggtccccgggatcgtcgacgacttcaggcgggccgcacggaacgcgatccaggctggtttcgacgccgtcgagatccacggcgcgcacgggtacctcctggagcagttcatgaaggacagctgcaacgaccgcacggaccagtacggcggcagcctggagaaccggtgccgtctcgccgtggaggtcgtggacgccgtcgtccgcgaggtgggcgcgcgccgcgtcggcatcaggctgtcgcccttcgtcgacttcgtggactgcgtggactcggacccggtggcgctcggccactacatggtgcagcagctcaacaggcatagcggcttgctctactgccacatggtggagccccgcattaccgcccacgggcgcaggcagatccctcacgggctcttgccgttccgaaaggcgtttcatggaacgttcatcgccgccggtgggtacgatcgggaggaaggcaacaaggtggtggcagaagggtatgctgacctcgtcgcgtatgggaagctgttcttggctaacccggacctgcctaggaggttcgagctggatgtggcactcaacaaatacgaccgctccaccttctacacgcaagatcctattgttggctacacagattaccctttctttgaagaagaagatggcaagaatgagaggtgaaatctgataatgtggagggttcatcaagtataagttcgtcattatttccaccattcattattggtcattgtggtggagtcattgtgtcatgttgtttcattctgtactagtgtggtgtgaagtgaaataaatctatttggtgaaattgttataaaataaaaaa

SEQ ID NO: 159 - DNA, 1789 bp, Zea mays
  CDS (83)..(1594)
ctcaccaccaccacacacgggagatagctatagctagcatagcaagccagccagtcagcgacttagcagcagctagctagccatgctgccgtccttcgtgtcgccgacggcgagcgccgcggcctcggtgacgcctccgccgcggccgataccaggcagctacgggccgccggtgctgggcccgctgcgggaccggctcgactacttctggttccagagccaggacgagttcttccggaagcgcgcggcggcgcaccgcagcaccgtgttccgcaccaacatcccgcccaccttccccttcttcgtgggcgtcgacccgcgcgtggtcgccatcgtggacgccgccgccttcaccgcgctcttcgacccggacctcgtggacaagcgcgacatcctcatcgggccctacaacccgggcgccggcttcaccggcgggacgcgcgtcggcgtgtacctcgacacgcaggaggaggagcacgcgcgcgtcaagaccttcgccatggacctcctccaccgctccgcccgcacctggtccgccgacttccgcgcgagcgtcggcgccatgctggacgccgtggacgcggagttcggcaaggacgacggcagcgacaagaagccctccgccagctacctcgtccccctgcagcagtgcatcttccggttcctctgcaaggcgttcgtgggcgccgacccgtccgccgactggctggtggacaacttcggcttcaccatcctggacatctggctggcgctgcagatcctgcccacgcagaagatcggcctcgtccagccgctggaggagctgctcatccactcgttcccgctgccctccttcctcatctggccgggctactacgtgctctaccgcttcatcgagaagcacggcgccgaggccgtggcctacgccgaggcgcagcacggcatcggcaagaaggacgccatcaacaacatgctgttcgtgctcggcttcaacgccttcggcggcttctccgtgttcctgcccttcctcgtggccaaggtcggcggcgccccggcgctgcgcgagcggctgcgggacgaggtgcggcgcgccatggtgggcaaaggcaaagacggcgagttcgggttcgccaccgtccgcgagggcatgccgctggtgcggtcgacggtgtacgagatgctgcggatgcagccgcccgtgccgctgcagttcgggcgcgcgcgcagggacttcgtgctgcgctcccacggcggcgccgcgtaccaggtgtccgcgggcgaggtgctgtgcgggtaccagccgctggcgatgcgggaccccgaggtgttcgagcggcccgaggagttcgtgccggaacgcttcctcggcgacgacggcgccaggctgctgcagcacctcttctggtccaacgggccggagacggcgcagcccgggcccgggaacaagcagtgcgccgccaaggaggtggtggtggacacggcgtgcatgctgctggccgagctgttccggcgctacgacgacttcgaggtggagggcacctccttcaccaagctcgtcaagcgccaggcgtcgccgagcgtggcgcaggcagcagccgccgccggagcgcagcagtgagtgcgctgtataggatccatcggtggcgtgcgacgtcgccggcgccggccaagcaataaagtaaattgagtaggccctcctcgtcatccacatgctcgtctgtgttcgacttcgatcggtgtctcttcctcccggccggccgctggccgccggcggccgttgtggtaataaaaaaaacacttgtgcaaaaaa

SEQ ID NO: 160 - DNA, 1684 bp, Glycine max
  CDS (26)..(1135)
gtagagataaaattatagaacaagaatgaaggtagcacaggtactgcacatgaacggtggcgttggacacgcaagctatgcaaacaactcccttcttcagcaaaaggtgatttgtttgacaaagcccataagagaggaagccataacaagcctctattgcaacaccgtccccagaagcttggcggttgcagatttgggttgctcttctggaccaaacactttgcttgttgtgtctgaattcatcaaaattgtggagaagctttgtcgggagctaaaccataaatctccagaatacaaggtctttctgaatgatcttcctgggaatgacttcaacaacatcttcaagtcccttgatagcttcaaaaagaagttgtgtgatgaaatggaaagtgggattggtccatgctacttctctggggttcctggttctttctatggcagggttttcccaaatcaaagtcttcattttgtccattcctcttatagccttcactggctatctaaggttccggagggtgtagacaacaacaggggcaatgtttacattggcagtacaagcccgacaaatgttgcaagagcttactatgagcaatttcaaagagatttctctctttttctcaagtgtcgtgcagaggaattagttaaaggaggtcgtatggttctaacatttttgggaagaagaagcgatgatccctctagcaaagatggtggctacgtttgggagcttatggctactgctcttaacgatatggtcttgcagggaatcataaaagaagagcagttagatacttttaacattcctctatacactccatctccatctgaagtgaaattggaagttcttaaagaaggttcatttgccagcaatcgtctagaggtgtctgaagtgaattggaatgcttttgatgactggaacgctcttgaatttgaatctgaaaggtctgatacacttagtgatggcggatacaatgtggcacagtgcatgagggctgtggcagaaccaatgcttgtcagccactttggtgaagctatcattgaagaggtttttagccgctaccaacaaatcttgactgatcgtatgtccaaggagcaaactaagtgcatcaatgtcaccgtattattgactagaaaagcataagcaagaagtttgcatctatatagggtttctcaaaatgggattgttgtagtcatagtttaaaaatatggctcgactaggcttgtcggatcgagatctgatgacataacccgtccgatttgattattggaccggttatgcatttggtccagaataatccggtccaacccgcccgatttggagtaaattcggcgatcctgtccgatatttccatttcgcctaaaaaagaaaacaaaaaaaaatgttaaaaaaacctaagacttaagtatttgtgttatactccaaagattaaggcagtcgatgtgagacttaagtatttttcaataatatatattggatcaaatcgagctaataactggcctaccggttagaacactgactcactacctcaactgggtcaatgacaggaagagattaactttggctgctctgagttgtgactttttgcttgttcgtttttcttctagcaattagctagatgttaagttggagaaaaataaaactagtattgtgtggttcagtaaaaaaaaaaaaaaaaaaaaaaaaaaa

SEQ ID NO: 161 - DNA, 1410 bp, Zea mays
  CDS (39)..(1184)
cttgtcactcatcagcacggttagtatagctagccaccatgaaggtagagcgcgatctccacatgagccggggcgacggcgaggacagctacgcctccaactcaaggcttcaggagaagtccatactgaagacgaggccggtgctgcacaaggccgtggcggcggcgcacgccttgtcgctctcctcaggaggacccggcggcggcgccatggtcgtcgcggacctcggctgctcgtcggggcccaacacactgctcgtcgtctcggaggtgctagcagcggtggcgatggtggccggcggcagcgcccaaccgcagcacgtgcagttcttcctgaacgacctccccgggaacgactttaacctcgtcttccggtcgctggacctgttgaagaacaagaagctggccgccaaggacaggcgggaggagtcgctgctaccgccgtactacgtggccgggctgccgggctccttctacacccggctgttcccggaccactgcgtccacctcttccactcctcctactgcctcatgtggcgctccaaggtccccgacgagctcgccggtggcgcggtcctcaacgagggccacatgtacatctgggaaaccacgccgcaggcggtggtggccctgtacaggaggcagttccaggaggacatgtcgctgttcctcaggcttcgccacagggagctcgtgcccggtggccacatggtgctggcgttcctgggcaggaagaagagcaaggacgtgcttcgtggcgaggtcagctacacgtgggggctcctcgcgcaggctctccagtccctcgtcaaacagggccgtgtgaagaaggataagctggactccttcaacctgccgttctacgcaccttcgatggacgaggtgagggacgtgatcacgcggagccaggcgttcgacatcacccacatccagctcttcgagtccaactgggatccacacgacgacgacgacgtggagatgaagatggaagaagacgtcgccgccgtccagagcggcgtcaacgtcgccaggtccatcagggccgtgatcgggcccctcatcgcccgccactttggcgagcacatactcgacgatctcttcgagctgcatgccaaaaatgtcgcagtgcacctgcagaaagtgaagaccaagtaccctgtcatcgtcgtttccctccaggcgaaatgagccgcgcgccaaataaaggaccaagctagctgatgcaaaatctggcgtcaagttagctattagtaccgctactattatatgcatgcagaataattagtcaaacaatcagaaaaataaagtgcctcagagactgttagtggcagatccaatgtttcgttaattatatgtagtgtaatggtaatggtaatggtaatggtagacatcaggtttcatcgtccaaaaa

SEQ ID NO: 162 - DNA, 1494 bp, Zea mays
  CDS (63)..(1208)
gaattcccgggtcgacccacgcgtccgcggcgcaccgctgaagcctaaactcgcagccagccatgtcgatgagaatcgagcgtgatctccacatggccacagggaacggagaaactagctacacaaaaaattctaggattcaagagaaagctatgtttcagatgaagtcggtacttgaggaggccactagagcagtatgcacagctctcctcccacaaaccatggttgtggccgacttaggctgctcatcagggcctaacacactgcgcttcgtcactgaggtgactagaatcatagctcaccattgcaagctggagcacaaccgacgacatgaccacccgttgcagcttcagttctttctgaatgacctgcccggtaacgacttcaacaatctcttccagctcatcgagcagttcaataagtcatcgacgacacacaagggagatgcagcaactgaggcactacagcctccttgctatatctccggattgccgggctcctactacactaggatcttccctagcgaaagcgttcatcttttccactctctgttctgccttcagtggcgctctcaggcaccagagcaactgaagggcacccaaaaatcatgcctagatatctacatcacaaagactatgtcaccatcgatggtgaagttgtttcaacagcagtttcagaaggacttctccctcttcctcaggctacgctatgaggaactcgtgtctggtggccaaatggttctaacatttattggaaggaagcatgaggatgtgttcactggagagtccaaccatctttacggattgcttgcgcagtcactgaaatccctagttgatgagggtcttgtggagaaagaaaaacttgagtcattctatcttccgatctactcaccgtcggttggtgaagtggaggcgatagtgaagcaacttgggttgttcaacatgaatcatgttaaagtatttgagataaattgggacccctacgatgactcagaaggtgatgatgtgcataacaatattgagagcggtgaaaatgttgctaagtgcctacgcgcagttatggagccgctggtcgcaagccaatttggagaacgcatactcgacaagttattcaaagagtacgctcgccgtgttgccaaacaccttgagaatgagaaaacaaagcatgctgttcttgtcctatccatcaagaaagcaataattcatgtgtgaagtgtcttgtttctcactatatatctttccattagtatcacatggtaatgtatgtttgttttgaatgtgcatgtttgtgtcactagctggtgtattgaatgtcatggtgtttttgttgttttctttatcgcttctcctatattttagatgcctgaattttaaggtgatttcaggcaacactcttgtacaaggaattaataccaataaattgctccttttatgatcaaaaaaaaaaaaaaaaaaaaaaaaaaaaaaaaaaaaaaaaaaaaaaaagggcggccgc

SEQ ID NO: 163 - DNA, 3150 bp, Saccharomyces cerevisiae
  CDS (1695)..(2894)
tgcacgtttatctatctatgttgcctccaaagggttattctctcaaaaagctcaatcactgtggaaccgaaaaataatgttatgaagattttttgagcagtatgtcttgtcaaaagctcaactagtgcagctgatgttgcttaaaaaaataaaaaccaaatttttctactttgctcttgtacgttgcacaaagaagattatgtaacaaacttgaagggactctcaaaaacttgctataaattgtacaaaagcctcaatatcacctagtagtggttctatacctgtctcgagccatcgccaaatagttgataaatttgattaatttctgcccttattcgcacgtgccataacacctgtacctctcacgctaaagacctttataatcaaggaaacttgttgctgcagaggaaataggaggtaatgaattgtgataaggcacatcacatcaatttttcttgcattcttgcatagaaagataggctgatgcaattagcgcgtttcaatcgcgtgccaaagacgtatatactaagcaatataaccgaattgattaagtagttggttaattgtatattttgtgataaagatggttaactgacttaggcggacataatagtagaaaatctatataatttttcccatgcagttgttattacaaaatgcaattcttgagatagcacaagcaagaataatagggcacggtacgttcattccacgtagcgttagctagtgctgccacaaggtaaacgtacgattatattcatttttgaaacggaagttctttgtaaccctcatgctcgtttgatagtcacttaactacaagatattctcgttcagtgattgcttgcttataaatcaggaaacttcatttttattccttacattttcgaaaagcccgcaaggttttcttcgccacgctcaagcattcatcgttgaaaagcaaaactgtgcacactgtaccttaggcgactcttctccgaacaagctcatggctcatttttaaaatcacaagcttcgtataattgccaagacataatctaattgagaaggtcagacggcaaaacaaatgaccgaaatcttcgtttattggttcgcctgcgttgccaactggtacattttcccagagtaccagcaaaggaaggcatccttgatgcctactctgatactgtggaggatttaaactgaaaatgatagtctgcgcggcaaatctttctatttctactaaagttggatcctccggccgatataacgtattctttttatccaataatgtcaattttaaatgctcgattactaatcgttactaaaatagcggacgcgcttatgcgtcttcgacggatagttttcagatcatccctctcagaaagcaatgcaggaaccgcctgtaaaactatcttttgctggcactcacacattatggtattgatgccacctgaaaatacggaaattaaccattccttgtacggagatctaagagcaactattattgaattgttgccgttaaagtttcatttcagttccgtgtgtggtcaagtacaagactactgatgaaatatgttgtacacacacggaaatatatatatatatatatatataacaatattgtgggttgaggtggagacttgatttttcttatacagtatattcttgttcattttttaccattttcaacaaaccacacaaagactttattcattatgctagccgaaaaaacccgttccataatcaaagcaaccgttcctgttttggaacagcagggcactgtcatcacgcgtacattctacaaaaatatgcttactgaacacaccgaattacttaatatttttaacagaactaatcaaaaggttggcgcacaaccaaatgccttggccactactgttttggcagcggctaagaacattgacgatttgtctgtgcttatggaccatgtcaagcaaattggccacaagcatcgtgccttgcaaattaaacctgagcattatccaatcgttggtgagtacttgttaaaagcaatcaaggaagttttaggcgatgctgcgactccagagataattaatgcatggggcgaggcttaccaagcaattgctgacatcttcatcactgttgaaaaaaaaatgtacgaagaagctttatggccaggttggaaaccatttgacattactgccaaagagtacgttgcttcagatattgttgaatttactgttaagccaaagttcggttctggtattgaattggaaagcttgccaatcactccaggtcagtatattacggtaaacactcacccaattagacaggaaaaccaatacgacgctttaagacactactctctttgttctgcttcaactaaaaatggtttacgatttgcagtaaagatggaagctgccagagaaaattttcctgcaggattagtctctgaatatttacacaaggacgctaaagttggtgatgaaattaagcttagtgctccggctggtgatttcgcaataaataaagagttgatacaccaaaacgaagttccattggtgttactatcgtctggtgttggtgttacaccacttttagctatgttagaagaacaagtcaaatgcaacccaaataggccaatttactggattcaatcttcctatgatgaaaagactcaagcattcaaaaaacatgtagatgaactattagctgaatgtgcgaatgtcgacaaaataattgttcatactgatactgaaccactgattaatgctgcattcttgaaggaaaagtcacctgcgcatgccgatgtctacacttgcggctctttagcttttatgcaagctatgattggtcatctaaaagaactagagcatcgtgatgatatgattcactatgaaccatttggtccaaagatgtcaaccgtgcaagtttaggcgttaagcctcggaaacttcaattttattactgattcatttgataatttcacttgttcgatttcacagtttgagaagttatattacgaaataagaaaaatttttaaaacatgagaccattgctaatcttttgttgttatactgtgttagaaatcctcgtgaaatccttgtgaaatcctatgtggaatatttagatagtaagtaaagattgtgtatgtatttataagatgaataagcgccaggtgctaaacagagt

SEQ ID NO: 164 - DNA, 3330 bp, Zea mays
  CDS (415)..(3150)
ttcggcacgaggatcgatctcacttagctgctgctgctgctgcttgctggtggcctgggcctggctgctgtgtctgtatcgatgtgtccgtattttctccatctcgtctgcatacgctgcaattggtaaggagctagctggcctttcatgtcttccatgctgccatagccatacgcccggccggaaggcaggataccccatcgctcgctgcacatgcatgtatgccgcatggggatacatgttcatcatcagcagcacagtggctctgtatcccccatcccaatccgatcctatataggaggaggagaaggaggagcagcagcagcagccaggcgcggccggcggccggagtagtatccgaatccgctcaacacccacaccggtgcgggtggtctctagctttcccatcgatcaatggctttcaaaggactcccgcgtgattcccgagggtccctcgaagtcttcaatccagacgcccctgtttcagatcgtgcaaccacctccccgttcctcctccctcctgcggtcgcgtcccatcccagcctcctcgccgccggagatggcggcgatgctgacgtgggtcgggcgacacagagggccgccgagtggggcctcgtcctccagaccgacgagcacaccggccgcccccagggtgtcgtcgcccgtccctccggttccaaccgcaccagcgagagtggcaactccatcgacgagagggccgccgccgccggtgctggtagagctctcccccgggtgtcggaggagcttcgcgccgcgctctcagcgttccagcagaccttcgtcgtgtccgatgccacccgccctgaccaccccatcctctacgccagcgctggattcttcaacatgacgggctactcctccaatgaggtcgtcggaaggaactgccgcttccttcaaggttctgggaccgaccccgtagagatttccaagatcagacaggctctcgcagctgggtcaaattactgtggccgtatcctcaactacaagaaggatggcacaccattctggaacctcctaaccgttgcccccataaaggatgaggatggcagggtcctcaagttcattgggatgcaagtggaagtaagtaagtacacggaaggtaacaaagatactgctcttcgtccaaatggattgccagagtcactcatcaaatatgatgcaaggcagaaggatcatgctcgtagctcagtctcggagctcctacttgccctgaaggatccacggtcattgtcagaatcaagaaacaataccttaaaaaggaaatcacaggaatcagcaggttcagctctagttcccggcaagagaagctccgaaactggatcccgtcgtaactcacatagtggaatgagaaactctctacaaaaaatcagtgaggtgcctgaaggagggaataagaccaggaaatctggtttgcgttcttttatgggccttattggtatgggacatgggaatgtagagaagaacattctaaaaccaagggaagatcccctacttgatagcgatgatgagagaccagatagcttcgatgacgatttcaggaagaaagaaatgagaaagggcatagatttggctaccacacttgaacgtattgaaaagaattttgtcatcaccgacccgaggttaccagataatccaattatatttgcatcggatagctttttgcgtttgacagagtattgccgcgaagaaatattgggaagaaactgcaggtttcttcaaggacctgaaactgaccgtgggacagtaaagaagataagagatgccatagataaccaaacagaagttactgttcagctgataaattatacaaagagcggtaagaaattctggaacctctttcacttgcagcctatgcgtgatcagaagggtgatgttcaatacttcattggggttcaattggatggaactgagcgtgttcgagaggctgctgcaaaagatggtgccatactggttaagaaaactgcagacaatattgatgaggctgcaaaggagcttccggatgctaatttgagacctgaggatctatgggctaatcactcaaaaccagtcttgccaaagccacatatgaaggatactgcatcgtggagagccatccaaaaggttcttgagaacggtgaaagcattgatttgaaacatttcagaccagtaaggcctttaggatctggtgatactggcagtgtccacttggtggagttgcttggcacaggtgaatactttgccatgaaagctatggataaaagtgtcatgcttaaccgaaacaaggtccatagagctaccgctgaacgacaaatccttgatatgttggaccacccattccttccgacattgtatgcatcatttcagacaaagacacatatatgtcttattgttgactattgtgctggtggggaactctttatgctccttgataggcaacctatgaaggttctgaaggaggatgcggtcaggttctatgctgcagaagtggtcacagcacttgaatacctacattgccaaggtataatctacagagacttaaagccagagaacattttacttcatagagatgggcacatttcattgacagactttgatttgtcttgcttgacatcctgccgaccacaagtgtttcttccacacgatattgataagaagaaaaagaggaggaagagcaggagtaatcccatattttttgctgaaccaatgcgagcatcaaattcttttgttggtacagaggagtacattgcaccggagattattaccggagctggccatacgagtgctgtagattggtgggcgctaggaattcttctatatgagatgttatatggttatacacccttcagagggaaaacaagacaaaggacatttgctaatattctgcacaaggatatcagatttcctgcgagcatacaggtgagcctggcggcaaggcagctgatataccggttgctacaccgagaccctgcaaataggctaggttcctatgagggcgctatggagatcaaacaacaccccttctttcgtggcataaactgggctctagttcgtgccgccacgcccccagagctggaggctcccctccaggatacattggaggccacactgcctcctcctgcagctgatgcggctcacaccgatatgttctgatcatacattgatccatgatgctgcatgttaatttgcttaaaggaagaaaaaaatattagatgatgaagatgcgtgactttggcatagatgagaacaataatgtatgttaaggactaattatcttgatccatctatgcatgctcacaattagaataaaaaaaaaaaaaaaaaaaaaaaaaa

SEQ ID NO: 165 - DNA, 949 bp, Zea mays
  CDS (85)..(771)
cgctgcaagcaacaaagttctactctgtccacccgtccatctagctctcaagaaccaacccgtaccagcgctatccggccggccatggcggcggcgcgccggctctccctgcccctcgtcctgctggtcgtcctggccgtcgccgggcgcgcggcggcgcaggactacgacttcttctacctcgtgctgcagtggccgggggcctactgcgacaccaagcagagctgctgctaccccaagtccggcaagccggcggcggacttcgggatccacggcctctggcccaaccgcgacgacggcacgtacccgcagaactgcagccccgacaacgccttcaacccgtcgaaggtgagcgacctaatgagcagcctccgcgccaagtggccgacgctggcgtgcccgtccaacgacgggctgcgcttctggggccacgagtgggagaagcacggcacctgcgcagccgacgtcttcgacgagcacggctacttccaggccgcgctgcgcctccgcgaccagctgggagtcctcggcgcgctcacctccgccggcgtcaagcccgacggcggctactacacgctgagccagatcaagggcgccatccgccagggcaccggcttcgagccctacgtggagtgcaaccgcgacgaggccggcaacagccagctctaccagctctacttctgcgtcgacgccgccggcgacagcttcgtcgactgccccgtcctccccagcggcaggccctgtggcaaccggatcgagttcccggctttctaagctaactcactcttcacgtcagttgctgcaatatactgctagtccttttgcttgcattctatgcaagaggataatggaatgttcattccccattcttcattttttttgcaaataaaaggagggcgatcggtgttccatatttattatgttgatcataacatgacattcagagaac

SEQ ID NO: 166 - DNA, 3010 bp, Zea mays
  CDS (210)..(2312)
catctgcctgccccccctcggccgccggcggcggcgatcgcgggtagccgccccaaccggccgaggttgcatagaggtgctggtatcttactctgcttctggttatgctatctgcctatgacttcagcttcccaaacttctccctgcttcttgcccctggttggtaaaaatctgtaacaactgctgccctgactgcaaaagacgcaactatgcgtctttcttcttctcttcaagatttgccgaccttcaccagaattgatgctttggaaaggggttctagcgtaggcagtgatctgagctcagggcgcccaaaacctgtccgcatgcttcaaagagatggtgccgtcgcaagcttttcaaaagaaagaacacccccctcatcgccgacaaatagaaagaaatgcatgagagcagccgggtgtgctattgcattgatcttactggtgttctttgcgtatggttcatggagatattttcatgtgttcctctctgaaggaagatctgaatactatgttgttcttgattgtggcagcactggtacgagagtttatgtctatgaatggcatattaatcataatgacgcaaatgcatttcctattgttttgaaacctttagggaatgctcccaagaagaaatctggtaaattaacccgactatatcagcgaatggagacagaacctggattgagcaagctcgttcacaatgaatctggattgaagaaggcaatagagccccttcttcagatggctgagaaattgatccctagacatgcacacaagcacactccactttttctatatgctactgctggtgttcgcaagctacctagtgcagattcagagtggctcctggataagtcctgggatatcctgaacaattcatcatttttatgtagtagagatagagttaagatcattagtggcatggatgaagcttattatggatggatagctcttaaccacaacatggatatgcttggcacctcatcatctaaaatgacatatggttcacttgatttagggggatcatcattacaggttacatttgagaatgataaatcagtgcaggatgagacaagcattcgtctgagtattggttcagttgaacatcacctcagtgcttattctcttactggttatgggttaaatgatgcatttgataaatctgtagcacatctagtgaaaagactgggaggagttgctagcaatggcaaggttcaagtcaaacatccctgtctacagactggattcaaggaagattatatttgttcttactgccatccattgaaacaagatggaagtcccagtgtcggcgagaagaacagtggcaaagagaagcagggaatagctgttgaactggtcggagcacctcagtggaatgaatgtagtgctcttgcaaaagtaacagtcaatctttctgagtggtccagtgcaagtccagggcttgattgtaacatccatccttgtgctcttgcctctaactttccccgaccatatgggcagtttttcgctatctctggcttctatgtggtttttaaattttttaatttgactgctgatgcgactctaggtgatgttcaaaaaagaggtcaggaattttgtgaaaaaccatggaaagttgcaaagagtagtgttcctccacagccttttgtagaacaatattgcttcagagctccttatatttcatcactactgagagagggattgcagattaaagatagtcaggtgataattggctctggcagtattacttggactcatggagttgctttgctggaggctggtcaagcattgtcttcacgactagatattcaaggataccgaatactgcacagggagataaatccaaatattctcatagtactgtttctgatttcaattgtgttggtcatatgtgccatactatgcgtcagcaattcgataccaagatcattccgcaagtcttatctgccaattcataggcataattctggaggcagttctgttcttggtatgggattgcctttcaaacatttattatggaatcccattagttcaggtgatggtagaacaaagacaccactgagccctactgttgctgggtcagatcctcatccatttgcaggactaggaggcagcagtgtcgagcttatggagtcctcgaggcaatccttgggtgcctatcacagctattctgttgggagcttaggtcagatgcagttttctagcggggtgaggaaccctagccgaggtcagactacacttcaaagtcggaggtcgcaatcaagagaggatctcagttcttcacttgctgatattcattttccaaaagtgtagcactgcatcaaggaatgactagaatgagatccttacatgccataacaaactctgtaaataatagctccagagttcgaactgcttgatttcttctctaatcagaagtcaattttgtctgtccgcttacacttcaatgaggtttaggattcatataaatgaacttatgacttgtgcctatcctggacatgatacatccattcatcccattgtatgtgctcaagaacataccatagcagtgaagttctggtagtgtactggaagatatatttatgccgttcaccagactggttgaccatggctacagcctacaactttatagatcgattgtgctgcaatcagggatgttatttttttgtatctgagacataataaaggtgcatgtggtctcatgtactgttgtaccctctaggctctagtggctctgtgaggttactcttctttcctggaataccttttgataggctactctgtggtatcaactgaaatcatgaaacactgacatcagttctactggattatctagttgcgtactgtgtatacacatctattgagttttttttgttggcatagtatctactttgatgacactgaaaatcagtataggaacatttgggccaatgtttttcctcgttgagctgagtttgatctgtattgcacatttgcttgtggatcaaaaaaaaaaaaaaaaaaaaaaa

SEQ ID NO: 167 - DNA, 1404 bp, Saccharomyces cerevisiae
  CDS (1)..(1404)
atgtttaaatctgttgtttattcaattttagccgcttctttggccaatgcaggtaccattcccttaggcaaactagccgatgtcgacaagattggtacccaaaaagatatcttcccatttttgggtggtgccggaccatactactctttccctggcgactatggtatttctcgtgatttgcctgaaggttgtgaaatgaagcaactgcaaatggttggtagacatggtgaaagataccctactgtcagtctggctaagactatcaagagtacatggtataagttgagcaattacactcgtcaattcaacggctcattgtcattcttgaacgatgattacgagtttttcatccgtgatgacgatgatttggaaatggaaaccacttttgccaactcggacgatgttttgaacccatacactggtgaaatgaacgccaagagacatgctcgtgacttcttggctcaatacggttacatggtcgaaaaccaaaccagtttcgccgtttttacctctaattctaagagatgtcatgacactgctcaatatttcattgatggtttaggtgaccaattcaacatcaccttgcagactgtcagtgaagctgaatccgctggtgccaacactttgagtgcttgtaactcatgtcctgcttgggactacgatgccaatgatgacattgtaaatgaatacgacacaacctacttggatgacattgccaagagattgaacaaggaaaacaagggtttgaacttgacctcaactgacgctagtactttattctcgtggtgtgcatttgaagtgaacgctaaaggttacagtgatgtctgtgatattttcaccaaggatgaattagtccattactcctactaccaagacttgcacacttattaccatgagggtccaggttacgacattatcaagtctgtcggttccaacttgttcaatgcctcagtcaaattattaaagcaaagtgagattcaagaccaaaaggtttggttgagttttacccacgataccgatatcctaaactttttgaccaccgctggtataattgacgacaaaaacaacttaactgccgaatacgttccattcatgggcaacactttccacagatcctggtacgttcctcaaggtgctcgtgtctacaccgaaaaattccaatgttctaacgacacctacgtcagatacgtcattaacgatgctgttgttccaattgaaacctgttccactggtccagggttctcttgtgaaatcaatgacttctacgactatgctgaaaagagagtagccggtactgacttcctaaaggtctgtaacgtcagcagcgtcagtaactctactgaattgaccttctactgggactggaacactactcattacaacgccagtctattgagacaatag

SEQ ID NO: 168 - DNA, 1995 bp, Glycine max
  CDS (105)..(1703)
cacttgttcaattactccttcaaatcagtctggcttgacaagcaggaaaggtatttattgctctctacttaggtaacataagccaacaattttagtagtaattaatggctggagaattgggagttttgaatgcacttgatgtggcaaagacacaatggtaccacttcactgctattgtgatcgctggaatgggtttcttcaccgatgcctatgacctcttctgcatttccctagtcaccaagcttctagggaggctatattacacagaaccaggtgcaccaaagccaggttcacttcctccaagagttcaagcttctgtgactggtgtagcactatgtggcacattagccggccaactattctttggttggcttggtgacaaaatggggagaaaaagagtctatggactaacactcattctcatggtagtgtgctcccttgcctcaggactctcctttgggtcaactccagagggtgtcatggcctcactttgcttcttcaggttctggctagggtttgggattggtggtgactaccctctttctgccacaatcatgtctgaatatgccaacaagaagacgcgtggcgcgttcatagccgcggtgtttgcaatgcaaggattcggaatcctggctggtggagtggtggcattgattgtttcatatgcatatgaccaaaagtacaagcttcctagttatgaacagaatccagaagcatccttggaccccgcatttgactatgtttggagaatagttttgatgtttggtgcagttcctgctgcactcacctactactggcgcatgaagatgccagagacagcacgttacactgcccttgtggccaagaatgcaaaacaagctgctgcagacatgtctaaggtgttgcaagtggaacttgaagctgaagaggagaaggtgaagaaattgacagagaatgagagcaacaagtatggtttgttcaccaaggaatttgtgaaacgccatggcctgcatttgttgggaaccaccaccacttggttcttgttggacatagcattctacagccaaaaccttttccagaaggacattttcagtgcaattgggtggatccctccagcaaaggaaatgaatgcaatccacgaggtgtataagattgcaagagcacaaacactcatagcactatgcagtactgtgccaggttactggttcacagtggcattaattgattacatgggccgttttgccatccaattgttggggttcttcttcatgactgtgttcatgtttgctttggctataccatatgatcattggtctgagaaagaaaacagaattgggtttgtggtgatgtactctttcacctttttctttgccaattttggtccaaattccaccacatttgttgtgccagcagagattttccctgcaaggctaaggtccacttgccatggaatctctgctgctgcaggaaaggctggtgcaattgtgggtgcatttgggttcctatatgctgcacaaagcaaggacccttccaagactgatgcagggtaccctactggtattggaattaagaactcactcattatgcttggtgtgatcaacttcattgggatgttgttcaccttgcttgttccagaatcaaagggaaaatcactggaggagttgagtggggagaatggtgaaaatgatgctgaacatgcagtgtctgctaggacagttcctgtttgattgaagttaagtttgtgttcaacaatgtggttcaacttcaaattgtgatatgtgtacattttaatactgggttttggttgtgacgtgtttacaccaatgatgtagtagttgcacggttcagggtgctagagcttaaaaataattacagtttgtttgcttttggttcttacttttgtttttttttttgtttaaaatagatacctggtaattttacttttgattatttgtaaagttttattgttttgttatttaatcacaatttatgattaatttattgtcttttaaaaaa

SEQ ID NO: 169 - DNA, 1947 bp, Zea mays
  CDS (128)..(1750)
cccacgcgtccggcttcaacaagctaggcagctgcaagcatctcccaaatcccagcctgctgccccgcgcgaacacacttctcttgtcgttgcattgcagggcagctagccggctacagcatccgccatggcgcgcggcggggacggcctgcaggtgctcagcgcgctggacgcggcgaagacgcagtggtaccacttcacggccatcatcgtcgccggcatgggcttcttcacggacgcctacgacctcttctgcatctccctcgtcaccaagctgctggggcgcatctactacacggacaccagcaaggacaacccgggctcgctcccgcccaacgtcgccgcggcggtcaacggcgtcgccttctgcggcacgctggccggccagctcttcttcggctggctcggggacaagctcgggcgcaagagcgtgtacgggatgacgctcatgctcatggtcatctgctccgtcgcgtcgggcctctcgttcggccacacgcccacgggggtcatggccacgctctgcttcttccgcttctggctcgggttcggcatcggcggggactacccgctgtcggcgaccatcatgtccgagtacgccaacaagaagacccgcggcgccttcatcgcggccgtcctcgccatgcagggcttcggcatcctcgccggcggcattgtcacgctcgtcatctccgccgccttccgcgcggggtacccggccccggcgtacagggacgaccacttcaactccaccgtgccgcaggccgactacgtgtggcgcatcatcctcatcctgggcgccgcgccggcgatgctcacctactactggcggatgaagatgcccgagacggcgcgctacaccgcgctcgtggccaagaacgccaagcaggccgcggccgacatgtccagggtgctccagacggagatcgtcgacgagcaggagaagctggacgagatggtcaccgccgagagcaacaccttcggcctcttctccagggagttcgcgcgccgccacgggctccacctcgtcggcacctccaccacgtggttcctgctcgacatcgccttctacagccagaacctgttccagaaggacatcttcaccagcatcaactggatccccaaggccaacaccatgagcgcgctggaggaggtgttccgcatctcccgcgcccagacgctcatcgcgctctgcggcaccgtcccgggctactggttcaccgtcgcgctcatcgacgtcgtcggccgcttcgccatccagctgctcggcttcttcatgatgaccgtcttcatgctcggcctcgccatcccctaccaccactggaccacgcccggcaaccacatcggcttcgtcgtcatgtacgccttcaccttcttcttcgcaaacttcggccccaacagcaccaccttcatcgtgccggccgagatcttcccggcgcggctgcggtccacatgccacggcatctccgccgcctcggggaaggccggcgccatcatcggggcctttgggttcctgtacgcggcgcagaaccaggacaagagcaaggcggacgccgggtaccccgcgggcatcggcgtgcgcaattcgctcttcgtcctcgctgcctccaacttgcttggctttatcctcaccttcctcgtgccggagtccaagggtaagtcgctcgaggagatgtccggggaggctgacgacgccgaggacgacgccgtcggcacccgcgcggtgcggccgtcggggacccagatggtgtagaatcgaacatggcgacgcgtgcacacgggtcctccatcctggggcccgactgggaagacaaggcgcgccggttcaagcctgccgatgctttgctgtgcagaagtagttcgtacaggtgcatgtgtgttataggcgggaaagtaagtgaacttacatgcttgtatttattatatccaaccttacgtacaaaaaaa

SEQ ID NO: 170 - DNA, 1701 bp, Xylella fastidiosa
  CDS (256)..(1545)
taagtttaaaaagcgttacgcacgttaagttgcctatttttttatgtattttgcgattcacgcagattgcgtgagcgctttaaggataacccaagaggcggatctataagcgcttaactattaaggtggtttcctttgcatacatctttttttgtggatgtctgtaatagcttaagcgcattattctttgatacctaacaaccgcccttacggtttgccgtttgggcgtctttccattgttaaggagcccacgctatgtccgatcttgataaggtcacgctcaatgccggtgagacttctctcgttttaccggttttgaaacccacgttaggtaatggttgcgttgatattgccaagttgacaaaggaaaccgggctgtttacttacgactctggttttacggcaactgcaagctgtaagtctgccatcacttacattgatggtgaaaagggtgtgttgttgtaccgcggctatccgattgagcagttagctgagcactccagttttttggaggtcgcttatttgttgatgaacggtgagttgccgagaaaagacgagtttgccaagtttgatgatgaaatcacgcatcacacgatgatgcatgagtcgttgaagaactttcttggcggttttcattatgatgcacatccaatggctatgttggctgcttcggtggcttcgctgtcggcgttctaccacgatacccttgatttgaacgatcttgagcaacgtcgcttagctgcaattcgtttgatcgctaaggtgccgacgcttgcagcagcagcgcatcgctactcgattggctggccgatccgctatccacgaaacaatcttggttatgtcgagcgctttttgcatatgatgttcgaagtgcctagtgaaccgctgcagttgaatccagttgtgaccaaagctctggatttactgtttattttgcatgctgatcatgagcagaacgcttcgacatcaacagtccgcttggtgggttcgactggtgctaatccttatgcatcggttgccgcgggtatcaccgcgttgtggggaccggcacacggtggcgctaatgaggccgtgttaaagatgttggaggagattggtgatgctaagaatgttgacttggttattgcaaaagcaaaaactaaggacaaaaactctccattccgtttgatgggtttcggccatcgtgtctataaacattttgatccgcgtgcgaaaatcatccgtgagatggcacacacagttcttggtgagttaggtgtgaacgatccgctactggaagtggcattaaagttggaagaggcagcgctgaaagatgattactttgtgcagcgtaagttgtaccctaacgttgatttttattcgggcatcatctacaaagccatcaacattcctttggaaatgtttacagtgatgtttgccatcgcgcgtaccgcagggtgggtttctcattggcttgagcagcaagtcgacccggagatgaaaatcagcaggccacgccaaatttacacaggtcatggcgagcgtgactacaaagatgctaggtaaagagtaaagagactcttatatcttccaatgtgcttctcagatgaaggagctattgtggatgcctgacgagatcgcgggtaataacccgaatgaccgaccaggaacagcgcctcaaacaacgtgaggtgctgacaatgtatagatggaccaactcat

SEQ ID NO: 171 - DNA, 1701 bp, Escherichia coli
  CDS (309)..(1592)
taaaagttatgaagtcggtatttcacctaagattaacttatgtaacagtgtggaagtattgaccaattcattcgggacagttattagtggtagacaagtttaataattcggattgctaagtacttgattcgccatttattcgtcatcaatggatcctttacctgcaagcgcccagagctctgtacccaggttttcccctctttcacagagcggcgagccaaataaaaaacgggtaaagccaggttgatgtgcgaaggcaaatttaagttccggcagtcttacgcaataaggcgctaaggagaccttaaatggctgatacaaaagcaaaactcaccctcaacggggatacagctgttgaactggatgtgctgaaaggcacgctgggtcaagatgttattgatatccgtactctcggttcaaaaggtgtgttcacctttgacccaggcttcacttcaaccgcatcctgcgaatctaaaattacttttattgatggtgatgaaggtattttgctgcaccgcggtttcccgatcgatcagctggcgaccgattctaactacctggaagtttgttacatcctgctgaatggtgaaaaaccgactcaggaacagtatgacgaatttaaaactacggtgacccgtcataccatgatccacgagcagattacccgtctgttccatgctttccgtcgcgactcgcatccaatggcagtcatgtgtggtattaccggcgcgctggcggcgttctatcacgactcgctggatgttaacaatcctcgtcaccgtgaaattgccgcgttccgcctgctgtcgaaaatgccgaccatggccgcgatgtgttacaagtattccattggtcagccatttgtttacccgcgcaacgatctctcctacgccggtaacttcctgaatatgatgttctccacgccgtgcgaaccgtatgaagttaatccgattctggaacgtgctatggaccgtattctgatcctgcacgctgaccatgaacagaacgcctctacctccaccgtgcgtaccgctggctcttcgggtgcgaacccgtttgcctgtatcgcagcaggtattgcttcactgtggggacctgcgcacggcggtgctaacgaagcggcgctgaaaatgctggaagaaatcagctccgttaaacacattccggaatttgttcgtcgtgcgaaagacaaaaatgattctttccgcctgatgggcttcggtcaccgcgtgtacaaaaattacgacccgcgcgccaccgtaatgcgtgaaacctgccatgaagtgctgaaagagctgggcacgaaggatgacctgctggaagtggctatggagctggaaaacatcgcgctgaacgacccgtactttatcgagaagaaactgtacccgaacgtcgatttctactctggtatcatcctgaaagcgatgggtattccgtcttccatgttcaccgtcattttcgcaatggcacgtaccgttggctggatcgcccactggagcgaaatgcacagtgacggtatgaagattgcccgtccgcgtcagctgtatacaggatatgaaaaacgcgactttaaaagcgatatcaagcgttaatggttgattgctaagttgtaaatattttaacccgccgttcatatggcgggttgatttttatatgcctaaacacaaaaaattgtaaaaataaaatccattaacagaccta

SEQ ID NO: 172 - DNA, 1523 bp, Oryza sativa
  CDS (105)..(1523)
gaacaatcgctctctctctctctccctccccgattcgattcaattcgcgacgcctccgtgaaattctccaaagccagcttgccctgtagccgcgtgctccggccatggcgttcttcaggggcctgaccgcggtgtcgaggcttcgatcccgcgtggcacaggaggccaccacgcttggtggtgtgcgatggctgcagatgcagagcgcatctgatcttgatctcaagtcccagctgcaggaattgattcctgaacaacaggaccgcttaaagaaacttaaatcggagcatggaaaggtccaacttggaaatataacagtcgatatggtccttggtgggatgagagggatgactggaatgctttgggaaacatcattgcttgacccggatgagggtattcgttttaggggtctctcgattccagagtgccagaaagtgctgccgacagcagttaaagatggggagcctttgcctgagggtctactttggcttcttttgaccggaaaggtgccaaccaaagagcaagttgatgctctatcaaaggaattggctagtcgttcgagtgttccaggtcatgtgtataaggcaatcgatgctctccctgtaactgctcatccgatgacccagtttaccacaggagtgatggcacttcaggtggagagtgagtttcaaaaagcctatgacaaaggaatgtcaaaatcaaagttctgggagcctacctatgaagattgcttaaatttgatagctcgccttccagcagtggcttcatatgtttaccggaggatattcaagggagggaaaactatagcagctgataatgcactggattatgcagcaaatttttcacacatgcttgggtttgatgatcccaaaatgcttgagttgatgcgactatatataacaatccacactgatcatgaaggtggaaacgtcagtgctcatactggacatctggttggaagtgctctgtcagacccttatctttcttttgcagctgcactgaatggtttagctggaccgttgcacggcctggctaatcaggaagtgttgttgtggatcaaatctgtaataggtgagactggtagtgacgttacaactgatcaactcaaagagtatgtgtggaagacactaaaaagtggaaaggttgttcctggctttggtcatggagttctacgtaagaccgatccacggtatacatgtcagagggagtttgctttgaagtacttgcctgaggatccacttttccaactggtctccaagttgtatgaagttgtgcctcctatcctcactgagcttggcaaggtcaaaaacccatggcctaatgttgatgctcacagcggagttctactgaaccactttggattatctgaagctcggtattacactgttcttttcggagtttcaaggagcattggaataggatctcagctcatttgggaccgtgctcttggcctgccgctcgaaagaccgaagagtgtcaccatggagtggctggagaaccactgcaagaaggttgctgcttga

SEQ ID NO: 173 - DNA, 1813 bp, Zea mays
  CDS (56)..(1564)
ctgcatttgcttggctgctgctcccttctcccaccgaccaactcgatcccgcgccatggatcgcgccgaccccgcgcggggccgccttgccgtgctctcctcccacctccgtggtgcaggggccgaggaggcggcggggctggagaggtcgccggtatccgcgccggcgcccgggccccgcgccggcgcgcttgccgtggtggacgggaggaccgggaagcggcacgaggtcaaggtctccgaagacggcaccgtgcgcgccaccgacttcaagaagattaccactggaaaggacgacaagggtcttaagatttatgatcctggttaccttaacactgcccctgttcgctcgtccatctgctacatcgatggagatgagggaatccttcgctataggggttatccaatcgaagaattggctgaaagcagctcgtttgttgaggtggcctaccttttaatgtatgggaacttgcctactcagagtcaattggcaggctgggaatttgctatttctcagcattctgctgttccccaaggactgttggatatcatacaatcaatgccccatgatgctcaccccatgggtgttcttgccagtgcaatgagcaccctttctgtctttcatccagatgcaaaccctgctctacaaggtcaagatctttataaatcgaagcaggtgagggataaacaaattgtgcgagtacttgggaaggcaccaacaatagcagctgctgcctacttgagattagcaggaagacctcccgtccttcctttaaatactctatcttattcagagaacttcttgtacatgctggactctttgggtgacagaacatataaaccaaatcctcgacttgctcgagctctagatattctttttattctgcatgctgaacatgaaatgaactgctccactgctgctgttaggcaccttgcttcaagtggtgtggatgtatttactgctctttctggtggtgttggagctctatatggtcctctgcatggcggcgcaaacgaggcagtacttaaaatgttaaatgagattggaagcatggaaaatattccagatttcattgtaggagtgaagaacaggaagaggaagatgtccggttttgggcaccgtgtgtataaaaactatgaccctcgtgctaaagtcataaggaaattggcagatgaggtgttctcaattgttggacgggatccacttattgaggtggccattgccctagaaaaggcagccctgtcagacgaatattttatcaagaggaagctgtatccaaatgtggatttctactctgggctaatttatagggcaatgggattccctacagaattttttcctgtgctgtttgctattcctcgcatgggtggctggctagcgcattggaaagagtcactcgatgatcctgacactaagattataaggccccaacaggtatacaccggcttctggcttaggcactatacccccgtcagagaacgagtgctatcaagccagagtgaggaacttggtcaggttgccacctcaaacgcaactaggcgccgccgtgctggttctgccctgtagaagctgcagcgtataaacgcaccggcatactcaataaacatcgaccacttttgtgcttgaaaaggccacaaatgctttttagcttggttggagttgtaggccttttgttgtcgagtatataggcaataatgcagtgagaacaccacaccgttacaatgtaaaactgtcacgaggcatcacttgctggtgtacaccccttgcgttctctatgacttaatcacttaacttcccaaaagatgaaaaaaa

SEQ ID NO: 174 - DNA, 1854 bp, Glycine max
  CDS (153)..(1691)
aacaatttcgcttttcccttcaaacttccaagttccaattcaactctgatccttaaattcatttgcatattcagtcctttgaattattccactttcttcaaatcattccaattccacaaccaacgaagaagcatcatcaacacaacacaacaatgtcaaaaacaacaacttcttccgaacaaactgcacgaaaccgtttggccaccctcgcagctcacttgcttccctccgacgccacctccgccgccgcgatcctccacccccaccggctctccgcccccaccggagacttgccgccggcgaacctgaagggcacccttaccgtcgtcgacgagaggaccggcaagaagtaccagatcgaagtcaccccagatggcaccgtcagagcctctgacttcaagaagatatcatctgggaaaaatgacaagggactcaaactttatgatcctggctatttgaacactgctcctgtcatctcaaggatttcttacattgatggtgatgctggaatccttagatatagaggatatcctattgaagacttggcagagaaaagcacctttacagaagtgtcatatctcatactgtatggaaatttgccttctgaaagtcagttagcggaatgggaattcgccttatctcagcattcagctgtaccacaaggagttttggatatgatagaatcaatgcctcatgatgcacatcctatgggcatgcttgtcaatgccatgagcgctttgtctgtttttcatcctgatgcaaatcctgctctcaaaggtcttgatatctacaactcaaagcaagtgagagacaagcaaatagcacgggttattggaaagataacaacaattgctgctgcgattaatcttagattggcaggaaggccgcctgtgcttccatccaacaaactttcttacacagagaacttcctatacatgctagattcttttggcaatcgatcatataaacctaatcctcgactaactcgagcgctggacattatcttcgtcctgcatgcagaacatgaaatgaattgctctacatctgctgtacgtcacctctcatcaagtggtgttgatgtatatactgctattgctggggctgttggagctctatatggacctcttcatggtggagccaatgaggctgtcctcaaaatgttgagtgaaattggaactgttgagaacattccagcattcattgagggtgttaaagccaggaaacggaagctcagtggttttggacatcgtgtgtacaaaaattatgatccaagagcaaaggtcttgaggaaactgacagaggaagtgttttccattgttggccgggatcctcttatagagattgctgttgccttggagaagattgcactgtctgatgagtatttcatcaagaggaagctatatccaaatgttgacttctactctggactgatttatagggccatggggtttcaacctgagtttttcactgttttatttgccatccctcgaatggccgggtacttggcacattggcgagagtccttggatgatcctgatacaaagattatgagacctcaacaggtttatgttggggagtggttgaggcattatgcaccaattaatcaaaggactgcatcaagtaacactgacaaacttggtcaattggctgtatcaaacgcctcaaagaggcgtcttgctggatctggggcttaactagtgaaactgccaagtgctcaataaggtccagactccagagaaaaaattaattttttttctggtacataaaataagtttgtttgtttatgtataaaattatgatatcaaatagataaataaaatcatgaaatcaataagaccatggtttcagtaaaaa

SEQ ID NO: 175 - DNA, 1271 bp, Oryza sativa
  CDS (22)..(1038)
gcagtgcaggtgtcgctggccatggcgaggaggagcagcagcagagcgtgcgcggccatggcgacggccgccgtctttgcgctgctggccgcgacggcgacggcgtcggggctcgtacgggtggagcacccggccaagagcgacgggtcgctgagcctgctcgtcgtcggcgactggggccggaagggcacgtacaaccaatccagggtcgccgagcagatggggaaggttggggagaagctaaatatagacttcgtcatatccaccggtgacaatttctacgaggatggactcactggcgtcgatgaccaggcgtttgaggaatcgtttaccgatatctacacggcaaagagcttgcagaagccatggtacctggtgctgggaaatcatgactacaggggtgatgtgctagcacagcttagcccagtcttgcgaaagatcgaccagcgattcatttgcatgaggtcgttcattgttaatgcagagattgtggatttcttctttatcgacacaactccatttcagctgaaatattggactcgccctaaagaccatcattatgactggagaggagtggcacctcgacaaaaatacataactaatctacttaaggatatggatgaggcaatgaagaaatcaacagcgaagtggaagattgctgttgggcatcataccattaggagcgtcagtgaccatggtgacaccaaggagcttctgcaacttctacttccagttctgaaggtcaatggcatcgacttctacatcaatgggcacgaccactgcctggaacacattagcagcagagacagtcctatccaatacttcacaagtggaggtggttcaaaagcatggagaggagtcttgcagccaaattctgataagctccagttcttttacgatggacaagggttcatgtccctccagataaaccaggaccaagctgacttcatattttatgatgtttctgggaacatcttgtacaagtggagcaagagcaaagcaaactacctccagccctccacctatatcactgaagcatgaggcagatgcaaaaccacaaaacggagaattagcttggctaagatatttgtatcaaatttgaatgcattattgtggcacgcaagggaagaggaccggaaaggaaataggaaagtatttaagcatggcatgtgattgatctactaaagaaatttgagacaaggccgagaccatcctactagactaggaaaagagatgttcagtatggtatccattagatctgattcaaaaaa

SEQ ID NO: 176 - DNA, 1441 bp, Zea mays
  CDS (143)..(1186)
cccacgcgtccgctcgtacgccgtcgcttcctgcggtacgtactctctgtccgcagcgttcctccagctagtagcagtagcagctagctagctagctagcaactggccatcggggctgctagcagcgtacgtacgtggcgcgatggctcctccagctcatgataggctccgccgcctggtgctgctcctcgtcgttgccaccgccgcggcggctttgcttctggcgccgacgacggcggatgctgcgctgccgcgggtgcagcacacgcccaccaaggccgacgggtcgctcgccatcctcgtcgtcggcgactggggccgccgtggacagttcaaccagaccttggttgcccagcagatgggcgtggtggggcagaagctggacatcgacttcgtcatctccaccggcgacaacatctacgacgacggcatcgccaacactagcgaccccctcttcaaggaatcgttctccaatatctacactgccaacagccttcagaagccttggtacctggtccttggtaaccatgactacacgggaaacgcgctcgcgcagctcgaccctgccattcgcaaagtggatagccggtacaccgccattgccaagtccttcattgtcaactcaggggttgcggattttttcctcgtcgacacaacgccgttcattgtccactactggaacaacaccaagttcgattggagaggcgtcgctcctcgagacacctacatcgcgaatctcctcaaggacttgaagtgtgcactgacagcgtccaaggctccctggaagatcgtcgtgggtcaccaccccatcagcagcgcctgcgggcatgggaacaacactgagctcgaggagttgcttctcccggtcctcaggacacacggggttgacatgtacttgaatggccatgaccactgcctgcagcgcgtcagcagcagagacagtcgtcttcagctactaaccagcggcggcgggtccaaggcatgggctggcaagttcaagcccaccctcgacaaggtggagttcctctacgacggccaggggttcatgtcgatgcgcctgagcaggacggaggcccgcctcgcgttcttcgacgtcgctggcagcgtcctgcactgctggaccatgcatgcccaaaaattaaagacgacgacgacgacgactgctgctgctgctgcagccgggcactaaagctttgctggatcggagttattaatgttcgttgctgcctcgcggcggtacgatgagttgatgatgcaattaattatttggttttgtcgtcttttcgtgcgtgagagggaagcaataataattatttgctgctgcttccgttgtgtgcacatgcatgtgagggtgtcaagtatgttcagcctcttgcaagataaaatctctcgtcttctatggaataaactgggaaaagagttttttttggtaaaaaaaaaa

SEQ ID NO: 177 - DNA, 1078 bp, Oryza sativa
  CDS (47)..(814)
gccaagacgacgacgacttgggaattcatttgcatcggcaacgacgatgaagctcgccgtggtcgccgtcgcggcgctcctcctcgccgccggcgtcgcctccgccgatgaattcgacttcttctacctcgtccagcagtggcctggctcgttctgcgacacgcaggctgggtgctgcttcccggacaccggcaagccggcggcggagttcggcatccacggcctgtggcccaactacgccaagtgccgtcccgccgccggcgccgtcgccgacgacgacgacggcgtggtggagatggtggtcgacggcggcgccgccgtcgagcgccaccaccggcggcggcagaagtgctggccggagtactgcgacgacggcaacaagctgcggccgtgggagatcaaggacctcgtggcggagctcgatgcgaactggccgacgctgtcgtgcaagggcggcaagagcttcgagttctggagctacgagtggaagaagcacggcacctgctcgggcatgggccagcacggctacttcgcggcggcgctggagctcaagaagcggcacgacctcgccgccgtcctcgccggcgccggcatcgtcccctccgacgacgagagctactccctcggcagcatccgcgacgccatcgccgccgccacgggcgcggtgcccaacctcgagtgcaaccgcgacgccgccggcgagacgcagctgttccaggtgtaccagtgcgtcgaccgctccgggaagaagctcgtcgactgccaactcccgatgcagggcaagtgccgcgacaaggtcaagctgcccacgttctagctagctagctcccccgtcgccatcgtcgccggcgagagctcgccgtcgccggcatggcggcgcgccggcggctggctggtcttggatgtctgatggatgtcacgtgcgtttgcgttgttgcgtggtgcggttttcagattacgagagattcgaggatttgtccagttggattgctacatgtgtacgttacatttggcactatctgctgacttgctgaacagttgaataataacatatcaagttttaccagttgaaaaaaaa

SEQ ID NO: 178 - DNA, 1145 bp, Zea mays
  CDS (55)..(888)
ttctaggagttgtactgagctgagctgccggaggcagaataggagaggcaggcgatgacgatggcgacgaaggcggcgtgcgtgctggcggtgtgggtgctcgtcgcctcgggcctgtgcgacctgggctcagcgcgcgcgcccctgggcagcaagccgcagcgggagttcgactacttcgcgctctccctccagtggcccggcaccatctgcgcctccacccgccactgctgcgccaccaacggctgctgccgctcggagccgctccagacgttcacgatccacgggctatggccggactacgacgacgggacctggccgtcgtgctgccgccgcacccaattcgagatggacaagatattgccactgaaggaggtgcttgacaagtactggccgtccctctactgctccaaatctggaacatgcttcagcggcaagggactcttctgggctcacgagtgggagaaacatggaacctgctctgcccctgtggttcaggatgaattacagtatttcacccttgcccttgacctctactccaagtataacgttacggaaatgctgtcaagtggagggatacaggtttcaaatggtaaggaatatgcactgagcgatgtcatcgataccatcaaacatgcttttgggggatcgccacaaattgtttgcaagaggggttcaatcgaagaacttaggttatgcttcgacaaagaattgaagcctcgtgattgccttaccacttctttggcgaatggaagtgtatcaaaaagcaagcactgcccgcggtacatcaccttgccaacatatgatccccttgtgcttgccaattcaactgtagagatcatgacacagttcgatgaatttgatgtgcctgcagctctttatacagcttaaaatgcaattgttgcaatagcagaaggtgctcgcgtgagcacctagaaccaggcacatttatcctgggatattcaatcatttgtacatgtacacttgaaagagaactgacatcttttcaacctgaaaatttataagctttatgtaaccgtgaaggtcggatattgcacatgtaattcgctaaatcaaaactgtatcttgaggtagaattttcaagtagtaataatagagatataagaaacttatcgcccaaaaaa

SEQ ID NO: 179 - DNA, 951 bp, Zea mays
  CDS (15)..(770)
cgtccacgttccatatggcttcctgcaggatggcactcctccttggcttgctgctgctagtagtagcttcgcccgcgatcgctgatgacgactccggtatctactaccagctggctcttatgtggccaggagcatactgcgagcagaccagcgctgggtgctgcaagccgaccaccggcgtctcgccggcgcgcgacttctacataacgggcttcaccgtccttaacgcgaccaccgacgctgcagtgacgggatgcagcaacaaagttccttacgaccctaacctgattaccggcatccaaggcctgaatcagtactggagcaacatcaggtgccccagcaacaacgggcagagcagctggaagaacgcctggaagaaggccggcgcctgctccggcctcagcgagaaagactacttcgagactgccctctccttccgtagccggatcaacccactcgttcgcctcaaagccaaaggtatcgagccggacttcgggctctacggcctcaaggcgatcaccaaggtcttcaagagcggcatcaacgcgacgccggtgatccagtgcagcaagggccccttcgacaagtacatgctgttccagctctacttctgcgcggcggggaacggcacgttcatcgactgccccgcgccgcagcagtacacctgctccaaggagatcctcttccaccccttcaagaagtggatgctcaagcagcagctcaaccaggacgacgaccctttccagctgcctggcgtcgccatggacaactgatacaccgtaccgtcgtctctgtttgcgtttctgtcaagtgtgcatggaataatactgtaactgtgtttcctgccgggcaatgcactgtgatatgatgcccaacgaataaatgtcgcttttatttttattcgacttcccccctgtaccgtgtggaaataaacctattataagcaaaaaa

SEQ ID NO: 180 - DNA, 976 bp, Zea mays
  CDS (95)..(781)
tcgatccctgcgctgcaagcaacaaagttctactctgtccacccgtccatctagctctcaagaaccaacccgtaccagcgctatccggccggccatggcggcggcgcgccggctctccctgcccctcgtcctgctggtcgtcctggccgtcgccgggcgcgcggcggcgcaggactacgacttcttctacctcgtgctgcagtggccgggggcctactgcgacaccaagcagagctgctgctaccccaagtccggcaagccggcggcggacttcgggatccacggcctctggcccaaccgcgacgacggcacgtacccgcagaactgcagccccgacaacgccttcaacccgtcgaaggtgagcgacctaatgagcagcctccgcgccaagtggccgacgctggcgtgcccgtccaacgacgggctgcgcttctggggccacgagtgggagaagcacggcacctgcgcagccgacgtcttcgacgagcacggctacttccaggccgcgctgcgcctccgcgaccagctgggagtcctcggcgcgctcacctccgccggcgtcaagcccgacggcggctactacacgctgagccagatcaagggcgccatccgccagggcaccggcttcgagccctacgtggagtgcaaccgcgacgaggccggcaacagccagctctaccagctctacttctgcgtcgacgccgccggcgacagcttcgtcgactgccccgtcctccccagcggcaggccctgtggcaaccggatcgagttcccggctttctaagctaactcactcttcacgtcagttgctgcaatatactgctagtccttttgcttgcattctatgcaagaggataatggaatgttcattccccattcttcatttttttttgcaaataaaaggagggcgatcggtgttccatatttattatgttgatcataacatgacattcagagaacaaaaaaaaaaaaaaaa

SEQ ID NO: 181 - DNA, 3805 bp, Sorghum bicolor
  CDS (238)..(3633)
cgcatccttccgcgccgggcatgggcaccgcgtcggcgcgcgcccctacccagtcgtcgacttgatgctgctcactcgcactcgtcgcagcgccccacgccccgctatttatgcgtacttgcttgccgggagagtcgctggaggtgggcgtcctcctcccgctccagagctcgctgcttcgctccacccacccttaagcaggagtgatatctggtggtttttcaaaagaagacaaaaatgtcttcctcgaggcctgcccactcttccagttcatccagtaggactcgccagagctcccaggcaaggatattagcacaaacaacccttgatgctgaactcaatgcagagtatgaagaatctggtgattcctttgattactccaagttggttgaagcacagcggagcactccatctgagcagcaagggcgatcaggaaaggtcatagcctacttgcagcatattcaaagaggaaagctaatccaaccatttggttgcttgttggcccttgacgagaagagcttcagggtcattgcattcagtgagaatgcacctgaaatgctcacaacggtcagccatgctgtgccaaacgttgatgatcccccaaagctaggaattggtaccaatgtgcgctcccttttcactgaccctggtgctacagcactgcagaaggcactaggatttgctgatgtttctttgctgaatcctatcctagttcaatgcaagacctcaggcaagccattctatgccattgttcatagggcaactggttgtctggtggttgattttgagcctgtgaagcctacagaatttcctgccactgctgctggggctttgcagtcttacaagcttgctgccaaggcaatctccaagatccagtcactgccaggtggaagcatggaggccttatgcaataccgtggttaaggaagtctttgagcttacaggttatgacagggttatggcttacaagttccatgaagatgagcatggggaggtctttgctgagatcaccaaacctggtattgaaccttatctaggcctgcactatccagccactgatatccctcaagctgccaggtttctcttcatgaagaacaaagtcagaatgatctgtgattgccgtgcaaaatctgtgaagattattgaagatgaggcactctccattgatattagcttgtgtggttcaactcttagagcaccacatagctgtcaccttcagtatatggagaacatgaactcgattgcatcccttgtcatggctgttgtggttaatgaaaatgaagaggatgatgaacctgggcccgaacaaccaccacaacagcagaagaagaagagactgtggggtctcattgtttgccaccatgaaagccccagatatgtcccgtttccactgcggtatgcctgtgaattcttggcccaagtgtttgctgtccatgtaaacaaggagtttgaattggagaagcagatacgagagaaaagcattctgcgaatgcaaacaatgctctctgacatgctgttcaaggaagcatctcccttgagtatcgtatctgggagtccaaatatcatggacctagttaagtgtgatggtgctgctcttttgtatggggacaaagtctggcggcttcaaacggctccaaccgagtctcagatacgtgatattgccttctggctttcagaagttcatggggattccactggcttgagtactgatagcctccaggatgctggatatccaggagctgcttcccttggtgacatgatttgtggaatggcagtggctaagatcacgtccaaggacattcttttctggttcaggtcacatacagctgctgaaatcaaatggggaggtgcaaagcatgatccatctgataaggatgacaacagaaggatgcaccctaggttgtcctttaaggctttccttgaggttgtcaagatgaagagtttgccatggagcgactacgagatggatgctattcactcattgcaacttattcttagaggtacactgaatgatgccttgaagccggtccaggcatctggtttagataaccagattggtgatctcaaacttgatgggcttgctgaattgcaagcagtgacaagtgaaatggttcgcctcatggaaacagcaactgttccgatcttggcagtagatggcaatggattggtcaatggatggaatcaaaaggtagcagaattgtcagggttgagagttgatgaagctataggtagacacatacttacacttgtggaggattcttctgtatcaattgttcagaggatgctatatttagctctgcagggcaaagaagagaaggaagttcgatttgagttgaaaacacatggctccaagagggatgatggccctgttatcttggttgtaaatgcttgtgccagtcgtgaccttcatgaccatgttgttggggtgtgctttgtagcccaggatatgactgttcataagttggtcatggacaaatttactcgggttgagggggactacaaggcaatcattcacaacccaaacccgctcattcctcctatatttggtgctgaccaatttggatggtgctctgagtggaatgtagccatgaccaagcttactgggtggcacagagatgaagtgatagataagatgctccttggtgaggtttttgacagtagcaatgcttcctgccttttgaagagcaaagatgattttgtacgtctttgcattatcatcaacagtgcattagccggtgaagaggcagaaaatgctccattcggtttgtttgaccgcaatgggaaatatattgaatgccttctgtcagtgaacagaaaagtaaatgcagatggtgttgtcactggagtgttctgtttcattcatgttcctagtgatgacctgcagcatgcgctacatgtgcagcaagcctctgagcagacagcacaaagaaggttgaaggctttctcgtacatgcgacatgccatcaacaaacctctctcaggtatgctttattctagggaaacactcaagagcacaggtctgaatgaagagcagatgaggcaggtccatgttgcagatagttgtcatcgccagctaaacaagatacttgccgacttagatcaagataacattactgacaagtcaagttgcttggatttggatatggctgaatttgtgttggaagatgtggtggtgtctgctgtaagtcaagtactgataggttgccagggtaaaggtatcagagttgcttgcaacctgccagagagattcatgaagcaaaaagtttacggggatggtatccgactccaacagatcctctccgacttcttatttgtttcggtgaagttctctcctgttggtggctctgttgatatctcttccaaactgactaagaacagcattggggaaaaccttcatctcatagacttcgaacttaggatcaagcaccaaggagcaggagtcccagcagaaatattgtcacaaatgtatgaggaggacaataaagagccgtcagaggagggtttgagccttcttgtttctagaaaccttctgaggctcatgaatggtaacattcgccacatcagggaagctggcatgtcaaccttcatcctcactgctgaacttgctgctgctccttcagcagttggacaatgaagccatcacatgctctctcagagttcattctgaaagccacggtggtttgcggagaatgggaaatgctgcagcgcgttgcatcaccgaatgcataagaaataagattgacttgtatggttatttgttagggggggaaagttgtactggcatagacgcatagtaagggcggccg

SEQ ID NO: 182 - DNA, 4095 bp, Oryza sativa
  CDS (67)..(3582)
gtgaggtgaggcgaggaaaaaatcggacgcacccgcctaatccggaccaatccacgcatcggcgccatggcctcgggtagccgcgccacgcccacgcgctccccctcctccgcgcggcccgcggcgccgcggcaccagcaccaccactcgcagtcctcgggcgggagcacgtcccgcgcgggagggggtggcgggggcgggggagggggagggggcggcgcggccgccgcggagtcggtgtccaaggccgtggcgcagtacaccctggacgcgcgcctccacgccgtgttcgagcagtcgggcgcgtcgggccgcagcttcgactacacgcagtcgctgcgtgcgtcccccaccccgtcctccgagcagcagatcgccgcctacctctcccgcatccagcgcggcgggcacatacagcccttcggctgcacgctcgccgtcgccgacgactcctccttccgcctcctcgcctactccgagaacaccgccgacctgctcgacctgtcgccccaccactccgtcccctcgctcgactcctccgcggtgcctccccccgtctcgctcggcgcagacgcgcgcctccttttcgctccctcgtccgccgtcctcctcgagcgcgccttcgccgcgcgcgagatctcgctgctcaacccgctctggatccactccagggtctcctctaaccctttctacgccatcctccaccgcatcgatgtcggcgtcgtcatcgacctcgagcccgcccgcaccgaggatcctgcactctccatcgctggcgcagtccagtctcagaagctcgtggtccgtgccatctcccgcctccaggcccttcccggcggtgacgtcaagctcctttgcgacaccgttgttgagcatgttagagagctcacaggttatgaccgcgttatggtgtacaggttccatgaggatgagcatggagaagtcgttgccgagagccggcgcagtaaccttgagccctacatcgggttgcattatcctgctacagatatcccacaggcatcacgcttcctgttccggcagaaccgtgtgcggatgattgctgattgccatgctgcgccggtgagggtcatccaggatcctgcactaacacagccgctgtgcttggttgggtccacgctgcgttcgccgcatggttgccatggccagtatatggcgaacatgggttccattgcatctcttgttatggcagtgatcattagtagtggtggggatgatgatcataacattgcacggggcagcatcccgtcggcgatgaagttgtgggggttggtagtatgccaccacacatctccacggtgcatccctttcccactacggtatgcatgcgagttcctcatgcaagcctttgggttgcagctcaacatggagttgcagcttgcacaccaactgtcagagaaacacattctgcggaccggaacactgctgtgtgatatgctactccgggattcaccaactggcattgtcacacaaagccccagcatcatggaccttgtgaagtgtgatggtgctgctctgtattaccatgggaagtactaccctcttggtgtcactcccacagaagttcagattaaggacatcatcgagtggttgactatgtgccatggagactccacagggctcagcacagatagccttgctgatgcaggctactctggtgctgctgacctaggagatgcagtgagcggaatggcggtagcatatatcacgccaagtgattatttgttttggttccggtcacacacagctaaggagataaagtggggtggtgcaaagcatcatccagaggataaggatgatggacaacgaatgcatccacgatcatcgttcaaggcatttcttgaagttgtgaagagtaggagcttaccatgggagaatgcagagatggatgcaatacattccttgcagctcatattgcgggactctttcagagattctgcagagggcacaagtaactcaaaagccatagtgaatggccaggttcagcttggggagctagaattacggggaatagatgagcttagctcggtagcgagggagatggttcggttgatcgagacagcaacagtacccatctttgcagtagatactgatggatgtataaatggttggaatgcaaaggttgctgagctgacaggcctctctgttgaggaagcaatgggcaaatcattggtaaatgatctcatcttcaaggaatctgaggaaacagtaaacaagctactctcacgagctttaagaggtgatgaagacaaaaatgtagagataaagttgaagacattcgggccagaacaatctaaaggaccaatattcgttattgtgaatgcttgttctacgagggattacactaaaaatattgttggtgtttgttttgttggccaagatgtcacaggacaaaaggtggtcatggataaatttatcaacatacaaggggattacaaggctatcgtacacaaccctaatcctctcatacccccaatatttgcttcagatgagaatacttgttgttcggagtggaacacagcaatggaaaaactcacaggatggtcaagaggggaagttgttggtaagcttctggtcggtgaggtctttggtaattgttgtcgactcaagggcccagatgcattaacgaaattcatgattgtcctacacaacgctataggaggacaggattgtgaaaagttccccttttcattttttgacaagaatgggaaatacgtgcaggccttattgactgcaaacacgaggagcagaatggatggtgaggccataggagccttctgtttcttgcagattgcaagtcctgaattacagcaagcctttgagattcagagacaccatgaaaagaagtgttatgcaaggatgaaggaattggcttacatttaccaggaaataaagaatcctctcaacggtatccgatttacaaactcgttattggagatgactgatctaaaggatgaccagaggcagtttcttgaaaccagcactgcttgtgagaaacagatgtccaaaattgttaaggatgctagcctccaaagtattgaggatggctctttggtgcttgagaaaggtgaattttcactaggtagtgttatgaatgctgttgtcagccaagtgatgatacagttgagagaaagagatttacaacttattcgagatatccctgatgaaattaaagaagcctcagcatatggtgaccaatatagaattcaacaagttttatgtgactttttgctaagcatggtgaggtttgctccagctgaaaatggctgggtggagatacaggtcagaccaaatataaaacaaaattctgatggaacagacacaatgcttttccccttcaggtttgcctgtcctggcgaaggccttcccccagagattgttcaagacatgtttagtaactcccgctggacaacccaagagggtattggcctaagcatatgcaggaagatcctaaaattgatgggtggcgaggtccaatatataagggagtcggagcggagtttcttccatatcgtacttgagctgccccagcctcagcaagcagcaagtagggggacaagctgatatggtgtatgctcgtcgctaacctcgcataactattcggtcaaccaggtgacctgggatcttctgatggagaacccagtttagtttatgagagttccagaaaccaacatttcgtccactctgatgaagcacatctgaactttggaacggcatcggtgattctcggtgtcgaggtggtccctccagtctcctgattcctggcatggcgactgtaagctcagctttggacgatgttgttctattagagttctatggcggcaagcaatgcacactgacggtcatgtaactcgtagcataggcccactatcacttggttgaagtacatatatgttctaaaagctgccatgtatataacatcggttatatatgtactacgtgcataaaggagagctgtgcagctcccagggtggtattttgtagggcttcccaagcctatgacatcttattatatcatcttaacataaaagcatttggtctccttggatgttggcaaaaaaaaaaaaaaaaatatat

SEQ ID NO: 183 - DNA, 8786 bp, Sorghum bicolor
  CDS (429)..(2640),(3333)..(4140),(5819)..(6112),(7491)..(7713)
  unsure (1)..(8786): unsure at all n locations
cagtgcgcttaacaaaaagctgcaaaggtgaaagtatccgcatccacatcagctttcagctggggagttcgtcgtcgtccccagcgcgagcgcaatccattccaaacctgaacccctgcggcccagcctcgatcccccacagccccagtcagtactactaccatccctatcccagccatgccatcgtcatcggcgcatcgccctgcgcgcaatatccttggctccacgcccctgcaacccacttcttattttattatcctcgtgatgatgatgagtcaataagcgcagtgaggagcggtgaagcaaagcgaagctaaccccccagtggagggggcgagcgagtcgacgagccgacggacgagcgcaagaccggccggggccggggccgcctaatccagagagagccccaggacttcttttccgccgccatggcgtcgggcagccgcgccacgcccacgcgctccccctcctccgcgcgacccgaggcgccgcgtcacgcgcaccaccaccaccaccaccactcgcagtcgtcgggcgggagcacgtcccgcgcgggcgggggaggtggaggaggaggaggtggcgggggcaccgcggccacggctacggccacggccacggagtcggtctccaaggccgtggcgcagtacaccctagacgcgcggctccacgcggtgttcgagcaatcgggcgcgtcgggccgcagcttcgactactcccagtcgctgcgcgcgccgcccacgccgtcctccgagcagcagatcgccgcctacctctcccgcatccagcgcggcggccacatccagcccttcggctgcacgctcgccgtcgccgacgactcctccttccgcctcctcgccttctccgagaacgccgccgacctgctcgacctgtcgccgcaccactccgttccctcgctcgattccgcggcgccgccccccgtttccctgggtgccgacgcgcgcctcctcttctccccctcgtccgcggtcctcctggagcgcgccttcgccgcgcgcgagatctcgctgctcaacccgctatggatccactccagggtctcttccaagccgttctacgccatcctccaccgcatcgacgtcggcgtcgtcatcgacctcgagcccgcccgcaccgaggaccccgctctctccatcgccggcgcagtccagtcccagaaactcgcggtccgtgccatctcccgcctccaggcgctacctggcggggacatcaagctcctttgcgacacagtcgtggagcatgttcgcgagctcacgggttacgaccgtgtcatggtgtacaggttccatgaagacgagcatggggaagttgtcgccgagagccggcgcgataaccttgagccttacctcggattgcattatcccgccacagatatcccccaggcatcgcgcttcctgttccggcagaaccgcgtgcggatgattgctgattgccatgccaccccggtgagagtcatacaagatcctgggatgtcgcagccactgtgtttggtaggctccacgcttcgtgctccacacgggtgccatgcgcagtacatggcgaacatggggtcaattgcatcacttgttatggcagtcatcattagcagtggtggtgatgacgagcaaacaggtcggggaggcatctcctcggcaatgaagttgtgggggttagtggtgtgtcaccatacgtcaccacggtgtatcccttttccattgaggtatgcttgcgagtttctcatgcaggcatttgggctgcagctcaacatggaattgcagcttgcgcatcagctgtcagagaagcacattttgcgaactcagacgctattgtgtgacatgctattgcgagattcaccaactggcatcgtcacgcagagccccagcatcatggaccttgtgaagtgtgatggggctgcactgtattatcatgggaagtactatccattgggtgtcactcccactgagtctcagattaaggatatcattgagtggttgacggtgtgtcatggggactcaacagggctcagcacagacagccttgctgatgcaggctaccttggtgctgctgcattaggggatgctgtgtgtggaatggcggtggcttatattacaccgagtgattacttgttttggtttcggtcacacacagctaaagagatcaaatggggtggcgcaaagcatcaccctgaggataaggatgatggtcagaggatgcacccacggtcatcattcaaggcatttcttgaagtggttaaaagcagaagcctaccatgggagaatgcagaaatggacgcgatacattccttgcaactcatattgcgtgactccttcagagatgctgcagagggcactagcaactcaaaagccattgtcaatggacaagttcagcttggggagctagaattgcgggggataaatgagcttagctctgtagcaagagagatggttcggttgatagagacagcaacagtacccatatttgcagtagatactgatggatgtataaatggttggaatgcgaaaattgctgagttgacaggcctttcagttgaggaggcaatgggcaaatctctggtaaacgatcttatcttcaaggaatctgaggagatagtcgaaaagctactctcacgagctttaagaggtattccatttttgtttcttacatggatgctattactttttatattatgttatatgagaattgcggagtgctgttgaggaaaagattatctgttcttggttgtatctcttaaggtatatataaaagaaaggtatatgccataacagaagtgtatggacatgatgtatacatgtttattagaccaaatattgaaacgtgtggtatatatactcttggaaaatggatatttgaaggagctaagcctagctcaattggtcgatggtgtggatgtacgcccaaacccagtcccccggttcaagtttgttgaggcgaatttttgcatgtttcttcttaattaaaaagctcccctatgttggtcaaggttttttaatagatatactcagtttcttagatgcacaaatatatagaaaatggggaccaactagagactaccatcaaatttactcaaccatttccacagtatttttagaatccggtgcttataactagcagataggaatgctcatatctgaaaagtaagcatatgaaacttataccaaaggttgtgttagctagtcacaggagtacattgtttctcgcccaggctgtttgaactattttaatctacttcccaatgcatgtagctaagctatgttagctttgatggatgtgcgattggagagtgctaatttgtaaagttgcttcccatacaggtgaggaagacaaaaatgtggagataaagttgaagacatttgggtcagagcaatctaacggagcaatatttgttattgtcaatgcttgttccagtagagattacacacaaaatattgttggtgtctgttttgttggacaagatgtcacaggacaaaaggtggtcatggataaatttatcaacatacaaggggactataaagctattgtacacaatcctaatcctctgatacccccaatttttgcatcagatgagaacacttcttgttcagaatggaacacagccatggaaaaacttacaggatggtcgagaggtgaagttgttggtaaatttcttattggagaggtgtttggaagtttttgtcgactcaagggcccagatgcattgacaaagttcatggttgtcattcacaatgctataggagggcaggattatgagaagttccctttttcatttttcgacaagaatggaaagtatgtgcaggccttattgaccgccaacacaaggagcaaaatggatggtaaatccattggcgccttttgttttttgcagattgcaagcgctgaaatacagcaagcctttgagattcagagacaacaagaaaagaagtgttatgcaaggatgaaagaattggcctatatttgccaggagataaagaatcctcttagtggcatccgatttaccaactctctattgcaaatgactgatttaaatgatgatcagaggcagttccttgaaacttgctctgcttgtgaggaacagatgtccaagattgttaaggacgccactctccaaagtattgaggacgggtcagtactaagtttaccccttctgctcacccattctctaatatttgcattgaatatttacatttgatcattcatattcgtttaacttgagcctggagtagccttgatctaaattttaattggcgctaatcttgactggtagaggtacaaaatcggagtaggaattagagaagttcatcagtcattagactatcacagtttgttctactgtctttgcagttctttaatattttcccttgcacctaagttattgccaacattagacgtagatccttgttttttgtaccaccctttaagacacctttgttgaagggcgggcctggtgcaggcggtagagtactaccgactgtgaccagatcaccagaaggtcctgggttcgagccgcaccctccttgcatttgcacattgcaagggtaaggcttgccgctgatacccttccccagaccccgcacagtgcgggatgctctcagcactgggtacgcccttcctttaagacacctttgttattatcccttatggcacttctgtggactgcttctctctcagccaatatctgaaactgtgtaagatcagcaacatttgccaacatatattgttgcaaatgtgaaggcagtccagattgctgtacttcaaaagatgcattggtgttttagaagcttcagcatatcctactgtagtactgtgcttaaaaatactcctatgcgtttggaacctctttttatttgaaacaaagtaccataccatcatactgtacagtaactggcatgcgtctggctgattatgtacattgttatggttgtaattatctaatggttgacgatatggctactaaaccagaaccaagccagatttgatggttttcacagtttccagtggaacttggtgaatctggtgtctttttctccatttttttcaaggatagcatgaatactacacaagtacatacaataactactgtatatactgaatatgtcaaattatgttaaaaaagtcaacttctgtaaaaacaaaaaaagtgcatagtgggggttttctgcttaccaatgttagcatacttattactaccaggattgtgaaactttgtgcttcaaatgctatatcatggatttttgttagaattaaaggaatagccttgtgaactgataaccttaccacattttagaggggtgtcaccaaagttcaagcagctttgtctaacatgcctctgcctgtagttttgtttgaggagcttcataaattatttggagatgctgtatttcatttgcttgcacggaaactcaaatcccttctggttgatttttatacacttggtcaggtccatctgtcttgctattggtaatgaattcccagaaagtgacttaaggcatgttcaagatattagttgcttctcatttggcaaagtctaaacacaaacttaccaagatatcacttggaatagctacttacacaatcctatattattactgtcacattatttgcttgacctcattatctaaagaaggtatttgcttgacctaattttcatttaggttcattggtccagtgtttagactgtagacagtagtgttttctcacttctttgtaacctaagacataagtttgaatgctgctgttatttgccttatttccacgattgattaactgaaaatttgttgaattgtttctctttatgtaacagctctttggtacttgagaaaagtgagttttcttttggagacgttatgaatgctgttgtcagccaagcaatgttattgttgagggagagggatttacaacttattcgggatatccctgatgaaatcaaggatgcatcagcatatggtgatcaatttagaattcaacaagttttggctgacttcttgctaagcatggtgcgatctgctccgtccgagaatggctgggtagaaatacaagtcagaccaaatgtaaaacagaattctgacggaacagatacagagcttttcatcttcaggttagctgcttgctctttgattataattcgtcacaaaatgtttttttttgtttcttcaaggaatatttgttgatgaattttggttgaagacaagtaacatgaattacttcaacctttggctggttggccgcatatgtggtgtgatacctttcaaatatacaacaacaaagccttttagtcccaagcaagttggggtaggctaatacctttcaaatatacatccgtgagaatttcgagagaattatcctgtttgcgtcatgctatatttttcgttttcttctgtcgacttaatttctttaacttaggccttgtttagttacacccaaaaaccaaaaacttttcaagattccccatcacatcgaatcttgtggcacatgcatggagcattaaacatagataaaaataataactaattacataatttgcttgtaatttgcgagacaaatcttttgagcctagttaatccataattggacattaattaccaaatacaaacaaaatgctacagtaccccaaaaatttcaccccaacaactaaacaaggccttagtgtactgtttggctgtgggatttgatggtaacataaacagtatcagaaggcaacagtaatggaaaatagagaaacgaatactgacattatttggttgagctcacacattggatttatactgcagcttatacaaagtcgttacagctcctgattgaactgggttcaagtgtgtaacctacctccgtcccactaatatatattttaaattgctctcatatgatgtaccaactaatagatatcacctttttttttggttccaaaccaatttttaaattagcataggcaaatacaaatccggacctatttgattagtactttaggatgtccgttacatacccaaactgctgcctgccatagagcattggtgagagaaactgagaattgacgaccttacctattgaagttcaaaactgtcctgtaatggtgccatggactgtaaatctgtaatcatctggatcttttagatgaattttactattttagtgtgctggcctaacttgagcaaaagtgattttcttttctgcaactcatattatttcaacaacctacattttttttaaaaaaaagagagaggaaaagacctctgcttttaagaaagcaacatcattcagtacaatactgggaacaaccagtttaacaagaaaagttcaaaagtcgacgttaaagcctattacagacaacaacctacatttgttgcattgtgcattaggtgattctggagaatcagcttccaaatgctaacaacggaaaactcaatgcctctattgggacttgagagtaccaataaatggaactaagtgatttccttttgatttttgtatgtccgtaggtttacctaccctggtgagggccttcccgctgacattgtccaggatatgttcagcaattcccagtggtcaacccaagaaggcgtaggactaagcacatgcaggaagatcctcaaattgatgggcggtgaggtccaatacatcagggagtcagagcggagtttcttcctcatcgtcctcgagctgccccagcctcgtccagcagctgatagagaaatcagttgatatatgttaagatctgcactgaccccacctaacttctcggtcgattaggtaacttaggtccctgataagagggtgcctaatttacaagaagcctggaaacaaatcaaagctgccatggcaattcagtgattgaatgttgttgaggatgttttcggtgcgccgcttaagtttgagtatccatgctgtggtttcaagatcagaatccatggcgggtggttatgtacaaatgcggcaaatgtggttcttagtgtaggttcatgaccagttccacgtagtacatatagcttatatgtatatataaatctgttctgtactatgcataaggagttgtttcagctcccacggttgtattttgcaggcctttctaggtctactgcaccctaatctagatttggttcctcgcttgaaaatcgccatcttagagcaagtattatagcaagctgtaagctagctaaatgctaaggtggagaagaaagagtaaaagcgggttgtaagcttagagcaagtattatggtgggctgtaagctggctaaatgctgaggtggaggagagaagtgatgagagagtgtagaaggactgtaaactttcttacagtcagcttaggcacaagaaccaagaaactttgtgagagagataagtgggccatgtattaatagtgaagagctaattattgtatggtgggctgggagaaagctgaaatgggctatattattaaacttgctcttatagccggtttagacacaaaaatcaagaaagtctgtgagacagatatatgagtcatgtattaatagtgatgagttaaccattatatgagtgggctgtaaaaagactataaagaaatcttactctgtattataatacttnacatcctgtcgatcccttgtgtgtgggcatgggaactacccggtggcgaattttctcacgtcccgtgatccttgtggatcgccggccggcatgggaactactggtacgatcatccccgtcttcctcacgtcctggtcctcatcaccggtggctatggggtgtgacagttggtggaggcgttggcgatgctcgacccccacctgcccggc

SEQ ID NO: 184 - DNA, 6755 bp, Oryza sativa
  CDS (1036)..(3100),(3205)..(4021),(4418)..(4711),(5272)..(5509)
cgagtcaatactacagaccgccaggtcgacaacagttagataggctaccctaaatattgtactggtatgattatggtgaataagagcaataccggcttcggccaacaggatgtagggttattacctgacaattcaggggcccgaacttgtataaaaatcctcgtcgtcatctcttttacctaagtctcacatatatcttagtaccaacgatccccatgttatgcaaataccggaaccgcgacatcaaacgtcgaccgacaacgtggtacagtataaaaaagtttttaaatatttttaggtctgatcaaaccatcgaatccaatcaatacagggcctactctaccaaagttctggcctttgggaagcatttccccattttttttagcacttaccacgagtggaaaaggacggacttctgcgcgaggaagaagaaccggatgacgttgtacggctttcctctctcggtttcccgacgcgaccgcctctgccgccatcgccgcctctcctcacctcgccgcgccgcgccgccccgcctcggccgcgcgcgtcccctcttccccgcctaagccccgcatcccgctcacccaccccacgcaccaacccccgcctcgcctcgccgtcgtcgtcgccgtcgccccctcgcctcgccgcctctgcgtggtggtgaggtagtaatcgctgttgcttcggtttccctttggttgggaggtgggaggaggaagacgaagagagggagagagagagggagatattatcttgggctgccttgccgtgcagtgtggctcgctgtcccactcaggtgcggcgctattccaatccgtgcttatccccggcagaatccaatccccctcgcggcttttctccaaaagcgctccgccttctcgcctatttcgctcgctgccgcggccatgattccccgctgatacctccgcgcgcgtcctcctcgccgaatcccccttcgcagccggtggttctagttgaggaggaggaggaggggatttggttgggggcgagggggaggagggggttgtggagatgtcgtcgtcgcggtcgaacaaccgggcgacgtgctcgcggagcagctcggcgcggtccaagcacagcgcgcgggtggtggcgcagacgccgatggacgcgcagctgcacgcggagttcgaggggtcgcagcgccacttcgactactcgtcgtcggtgggcgcggccaatcggtcgggcgccaccaccagcaacgtctccgcctacctccagaacatgcagcgcggccgcttcgtccagcccttcgggtgcctgctcgccgtccacccggagacgttcgcgctgctcgcctacagcgagaacgccgccgagatgctcgacctcacgccgcacgccgtgcccaccattgaccagcgcgaggcgctcgccgtcggcaccgacgtgcgcacgctcttccgctcgcacagcttcgtcgcgctgcagaaggccgccaccttcggggacgtcaacctgctcaaccccatcctcgtccacgccaggacctccgggaagcccttctacgccatcatgcaccgcatcgacgtcggcctcgtcatcgacctcgagccggtcaaccccgtcgacctgcccgtcaccgccacaggcgcgatcaagtcgtacaagctcgctgccagggccatcgccaggctgcagtccctgcccagtgggaacctctccctgctgtgcgacgtgctggtccgcgaggtgagcgagctcactggctatgacagggtgatggcgtacaagttccatgaggatgagcatggtgaggtgattgctgagtgcaagagatctgatttggagccgtatcttggcctgcactacccagccactgacattcctcaggcatccaggtttttgttcatgaagaacaaagtgcggatgatatgcgattgctccgcaacgcctgtgaagatcatccaagatgacagcctaacacaacctataagcatatgcggatctactctcagggcaccccatggttgccatgcacagtacatggcaagcatgggctccgttgcatcacttgtgatgtcggtcactataaatgaggatgaggatgatgatggagacactgggagtgaccagcagccgaaagggaggaagctgtgggggttgatggtctgccatcacacaagcccgaggttcgtccctttcccgcttaggtatgcttgcgagtttctcttgcaagtatttgggatacagatcaacaaggaggtggaactggctgctcaggcaaaggagaggcacatcctccgcacgcagactcttctctgtgatatgctccttcgagatgctcctgttgggatatttacccaatcacctaacgtaatggatctagtgaaatgtgatggtgcagcattgtattaccaaaaccagctttgggtgctaggatcaacgccctctgaagcagagataaaaaacattgttgcttggttgcaggagtaccatgacggttctactggattgagtaccgacagcttagttgaagcaggttatcctggcgctgctgcacttggtgatgttgtgtgtggcatggcagctataaagatctcttcaaaagatttcatcttctggttccgatcccacacggcaaaggagattaaatggggaggagctaagcatgaaccaattgatgcagatgacaatggtaggaagatgcatccacgatcttcattcaaagccttcttggaggtagttaaatggaggagtgttccttgggaggatgttgaaatggatgctatccattctctgcagctaatattacgtggctccttgcaagatgaagatgccaacaagaacaacaatgcaaagtccattgttacagctccatctgatgatatgaagaagattcaggggctccttgaactgagaaccgttacaaacgagatggtgcgcctaattgagacagcaactgcgcctatcttggctgttgacatcactgggagcataaacggatggaataataaggctgcagaactcactggattacctgtcatggaagccatagggaagcctctggtcgatctcgtcatcgatgattctgttgaagtggttaagcaaattttaaattcagctttacaaggttggctctatgttgaacttggcctttttgtaccatccaacttaatcataatgtgtccattattttttgggtgactaacttaggtcttctttcttgtatttcaggaatagaagagcaaaatctgcaaattaagcttaaaacatttaatcaccaggaaaataatggacctgtaattttgatggttaacgcctgctgcagtcgtgacctttcagagaaagttgtgggggtttgctttgtagcacaagatatgacagggcagaacattatcatggataagtacactcggatacaaggggactatgttgctatagtaaagaacccttcggagctcatcccccctatatttatgatcaatgatcttggttcctgcttagagtggaatgaagctatgcaaaaaattactggtataaagagggaagatgcagtagataaattgctaatcggggaagttttcacccaccatgagtatggctgtagggtgaaagaccatggtactctgaccaaacttagcatattaatgaacacagtgatatctggtcaagatcctgagaagcttctttttggtttcttcaacaccgatggcaagtacatagagtcactgatgacagcaaccaagaggacagatgctgagggtaagatcactggcgccctttgctttcttcatgtggccagcccagagcttcaacatgctctgcaggtgcagaagatgtctgaacaagctgctatgaacagctttaaggaactgacatacatacgtcaagaattaaggaacccactcaatggcatgcaatttactcgtaatttgttggaaccttctgacttgactgaggagcagaggaaacttctagcatcaaatgtcctctgtcaagaacagctgaaaaagattttacatgacactgatctagaaagcattgaacagtggtgagtgccgtttgttccactgtagtctgacatatagatatttgccaacttttattctgagcccttccattgttcttgaaatcacgctttaatgatttttaaccatagcaaatttagatggtcttgcaggttcagaactgaaatcaccactgtttcatgccttttctccaattatatagtctatatgtagaacaacatgatatgtaaaaaaggaaactttctatttagtggttggaattaacctatacacggaaaattccattggtaccataacagttccagcactacaaaataagttcatataaagctgtataatatgcctattccatttgcttttttcacgcacaagaagatctgatagaatacgtattggttactaactctgtgctcccacagctacacggagatgagcaccgtagatttcaacctggaggaagccctgaatacagtcctaatgcaagccatgccccagagcaaggagaaacaaatttccattgaccgtgattggcctgcagaagtatcatgtatgcacctctgcggggacaatttaaggcttcaacaagtcctagcagacttcctggcatgcacgcttcaatttacacagccagctgaagggcctattgtgctccaagtcatccccaggatggaaaatattggatctggaatgcagattgctcatctagagttcaggtaagccacccatttgccttgtggaacttatagtgatgtttcttgaactgcgagtacagctttactggtaatagaaccaacttaaactttgcatgcaatgacctaatttccattactccaactcaacttctctggggagaaatctgtttgttaacatgcgttcagtaagtactagaggcgcactattgagttctagacacctttattcctgcagcttgtgtttactgtccatcttatcaatagaggcaggacactcagtagtcacataaaaactgacggttcaaaatagcccttccatattatctcaacataaacatagcataaacataaaatgcaatatcgtaacatctgagtaatgactatataaccaattcaatgatgcaacccttacaactatttaagataacggataacccggccgacaacccttacaactgtggagtaaaaggagattgattagatgatgcgaagctttagattgttcgacgagcttgctggggcacaaccccacttaacagaagcgtaatcttaacatctgcccaacggttggctccatgcaggcttgtccatccagctccgggcgttccagaggctctgatacaagagatgttccgccacagcccaggtgcatctcgagagggccttggcctttacataagccagaagctcgtgaagacgatgagcggcacggttcagtacctccgggaagcagagagctcgtcgttcatcgtcctggtagagttcccggtcgcccagctcagcaccaagaggtgcaaggcttccacgagtaaattctgaacttagggctatggccaaaattcttgtgggtgctgtattgttgttgttgctgctgctgctattagcagatcaggcagtctgaggagtacgttagctgaagatgtatcagatgtgtgtagcttgtgaaagtgaaggtagtggttggatagatgtattggtcacgttgatgtctggagagctagtgagcgagctactaggtgttagtgtaatttaaccggcaaatgtatgaacgaattatgaataaaatcttcacttgtgttgtcatgaataaaatcttcacttgtgctgtcattatttccgaaattattcatcaaattcgaaaaaaaaagaagtgaactatttatatattttatcggacaaatacacaaaaatcttagaattatatcgagttgtgtgtgaattagattgcgaataggcccttggtaaaaatgaaaaaaaatatggggggtttcagtttttacaagcccatttggtcaatactgggctagccgttgttggcccgaccgccggaggctcactcgcagcggtcgatcatggcggggagggagaagaggcggcgggtggcggcgctcgacggcgaagagcggcggcggcggcaggaggaagcggcgaccctcctccacaggatcagaggtgcactccccctccctctcgtgatcaatcgcctaaaaaacttctgaatccttcatcaaccgaagtaaacacgcgtccctcgttttttgcgcagggttggtgcgctgggtcgtcgccgaggtcgccgccggccgctccccgtccgtcgcgctccaccgctaccagaactactgctcctccgcctccgccgccgccgcgtccccatggtcggtttccgcgtctcgccctaccctaccatctcatcggccgtttcaaattctcaccccgctgtatgcgcttgcagcgcctgcagctacgacgtccccgtgggcacagatgtactctcgctcctccaccggggctcccacgcctcccggctcagtacgcgtcgttgatttttgtctcaacctgcgtatctacgatcatgttaatgttaatcagtttgggatgttttaatcgatgtgcagatgtgctcctcagggttcttctcgtcgtgcagcaactcctgcagcagaacaagcactgctccaagagggacatctactacatgtacccctccatattccaaggtctgcataggttccatgcctccgcttctgcttttgtttcctgctgtgtgtgacaattggaattc

SEQ ID NO: 185 - DNA, 3755 bp, Sorghum bicolor
  CDS (303)..(3710)
ctgccccgcgcaagccggctcgctgtcccactcgcgcgccacgcctgacgcctcggacccggaggtgtattccctcttcttcccccgtgcttatccgcggcggaatccaatcccctccctcatcacgtccttctcccaggcaaagcccctctttttgggcgtatgcccccgctggcgcgcctatgattcccgccgattcatccgcccgctcggtccagcaacccttgctgctgcagtgctgcggctagttcggtggcggggaaggaggaggaggagggatcttgcagtggggcgaagcggagatgtcgtcgccgttgaacaaccgggggacgtgctcccggagcagctctgcgcggtccaggcacagcgcgcgggtggtggcgcagacgcccgtggacgcgcagctgcacgccgagttcgagagctcccagcgcaacttcgactactcctcgtcggtgagcgccgccatccgaccgtcggtcagcaccagcaccgtctccacctaccaccagaccatgcagcggggcctctacatccagcccttcggctgcctgctcgccgtccacccggacaccttcacgttgctcgcctacagcgagaacgcgccggagatgctcgacctcacgccacacgcggtccccaccatcgaccagcgggacgcgctcgccgtcggcgccgacgtgcgcacgctcttccgctcgcagagctccgtcgcgctgcacaaggccgccaccttcggggaggtcaacctgctcaaccccatcctcgtgcatgccaggacgtcggggaagcccttctacgccatattgcaccggatcgacgtcggccttgtcatcgaccttgagccggtcaacccagttgacgtgccagtcactgctgcgggtgcgcttaagtcgtacaagctcgccgccaaggccatctccaggctgcagtcgctgcccagcgggaacctgtcgctgctgtgcgatgtgcttgtccgtgaggtgagcgagctcacgggctatgaccgggtcatggcgtacaagttccatgaggatgagcatggtgaggtcatttccgagtgcaggaggtctgatctggagccgtatcttggcctgcactacccagccaccgacatcccgcaggcgtccaggttcttgtttatgaagaacaaagtgaggatgatatgtgattgctctgccactctggtgaagatcattcaggatgatagcctagcacagcctctcagcctctgtggttccaccctcagggcttcccatggttgccatgcacagtacatggcaaacatgggttctgttgcatcgcttgtgatgtcagtgactataagcaatgatgaggaggaagatgttgataccgggagtgaccaacaaccgaaaggcaggaaactgtgggggctggtcgtctgccatcatacaagcccgaggttcgtccctttcccactaaggtacgcttgcgagtttctcttgcaagtatttggcatacagctaaacaaggaggtggaattggctgctcaggcaaaggagaggcacatcctcagaacgcaaacccttctttgggatatgctcctgcgggatgctcctgttgggatatttacccagtcacctaatgtgatggatctagtaaagtgcgatggagttgcattgtattaccagaaccagcttttgttgctcggatcaacaccctccgagtcagagataaagagcattgccacatggctgcaggagaaccatgatggttcaactgggctgagtactgacagcttagtggaagcaggttatcctggtgctgctgcacttcgtgaagttgtgtgtggcatggcggctataaagatctcttccaaagattttatcttctggttccgatcgcacacaacaaaggagatcaagtggggtggggctaagcatgaaccggttgacgcagatgacaatggcaggaagatgcatccacgatcttcattcaaggccttcttggaggtggttaaatggagaagtgttccctgggaggatgttgaaatggatgctattcattctttgcagttaatattacgtggctccctgcaagatgaagatgccaacagaaacaatgtaaggtccattgtaaaagctccacctgatgatacgaagaagatacaggggctacttgaactaagaacagttacaaacgagatggtccgcttaattgagacagcaaccgcccctgtcttggctgtcgacattgccggtaacataaatggatggaacaataaagctgcagaactaacagggttacctgtaatggaagccatagggaggcctctgatagatcttgttgttgttgattctattgaagtggttaagcggattttggactcagctttacaaggaattgaagagcaaaatctggaaatcaagcttaaagcattccatgaacaggaatgcaatggtccaataatcttgatggttaactcctgctgtagtcgggacctttcagagaaagtcattggagtttgctttgtaggacaagatttgaccacgcagaagatgattatggataagtatactaggatacaaggagactatgttgccatagtaaagaaccccagtgagctcatccctcccatatttatgatcaatgatcttggttcctgcttagagtggaataaagctatgcagaagattaccggtatacagagggaagatgtgatagataagttgttaattggggaggtcttcacccttcatgattatggctgtagggtgaaagatcatgctactctaacgaaacttagcatactgatgaatgcagtgatttctggtcaggatcctgagaagctcctttttggtttcttcgacacagatgggaagtatattgaatccttgctgacagtgaacaagagaataaatgctgagggtaagatcactggcgctatttgctttctgcatgtggccagtccagagcttcagcatgctctccaggtgcagaaaatgtctgaacaagctgccacaaacagttttaaggaattaacttacattcatcaagaattaaggaacccactcaatggcatgcaatttacttgcaacttattggagccttccgaattgacagaggagcagaggaaacttctttcatctaatattctctgtcaggaccagctgaaaaagattttacatgacactgatcttgaaagcattgaacagtgctatatggagatgaacacagtagagttcaaccttgaggaagctcttaatacggtcctaatgcaaggcattcctttgggcaaggaaaagcgaatttctattgaacgtgattggccggtggaaatatcacgcatgtacctttacggggacaatttaaggcttcagcaggtcctagcagactatctggcatgcgcccttcaattcacacaaccagctgaaggacctatcgtgctccaggtcattcccaagaaggaaaacattgggtctggcatgcagattgctcatttggagttcaggattgtccatccagctccaggcgtccccgaggccctgatacaggagatgttccggcacaacccagaggtgtccagggagggcctcggcctgtacatatgccagaagctggtgaaaacgatgagtggcacggtacagtacctacgagaagccgatacctcatcgttcatcatcctgatagagttcccagtcgcccagctcagcagcaagcggtccaagccttcgacgagtaaattctgacactcatgctcctggaactgcagtgagagttcgggcggccgcgaa

SEQ ID NO: 186 - DNA, 953 bp, Oryza sativa
  CDS (35)..(676)
ttctctccccctgttcacaccacgcctcactcccatggcgaccgaggaggacgcgtcgaccatggcggcggccgaggcggaccccaagcccgccgccaccccgtcttacccggagatgatactggcggcgatcgaggcgctggacgacaggaacgggtcgaacaagacggcgatctcgcagcacatcgaggggaagtacgaggggctcctcccccccgcgcacccgtcgctcctcacagcgcacctcgcccgcatgaagcagaccggcgagctcgccttctccaagaacaactacttccgcggcgacgacccgtccctcccgcccaagcgcggccgcggcaggccgcccaagcccaaggacgccgccgccgccgccgctgcaccggcgcccgcgcccgcggcgccggcggcctcctcgccgcgcccccgtggccgcccgcctaagcccaaggaccccctcgccgaggcggtcgcgaaggccaccagtggcatgccccgcgcgcgcggccgcccgcccaagaaggccaaggtcgaacaggaagaccccattggcgctcccgccgcagcttcggctcccgccgcggcggctgaggccgcgccgcctgtcaagcgcggccgtgggcgcccgcccaaggtgagacccgccgcgccggtcggggagccagccgctgcttgattagctccgattctccgcatcgccgcgatggcgacgatggtaagctcctttaggttgtaacgtagtcttcagattatgtctcgtactgattggaggcgcggctcgggttgctgcttattgtaagttaatcggatggtgggaggtttaggtgtgctggatggatcatccgttgctgagagttgtgattgaattcgtgttatcgcgtgctgattattatggtaatgttggtgactttcgtgtcgtttgtgttaattctagattggtggctgcatttagt

SEQ ID NO: 187 - DNA, 2957 bp, Oryza sativa
  CDS (58)..(2271)
agctggtgggcgttcagggcggagaagtagaggcggcggtgccgtggggcggcgcccatgcagcagcaccagggtggcgggtcccagtacggggccgtgccgccggacatggggccgttctcgccgacgcatcatgcttcggcgccggcccccctgccgctgagcacggccaccgccgcggcgttgtctcagccaccgccgccgcagcagcagcagcagcaaccgaggacgagctacgacgagctggccgccgcgaccagcgccggcgcgggcggcttccccgacgacgacatgctgggcgacgccggcggcagcggcggcggcggtgggtcgggagcggccggcaaccggtggccgcgggaggagactctagccctcatcaggatccggtcggagatggacgccaccttccgcgacgccaccctcaagggtcccctctgggaggaggtctccaggaagctcgcggagttgggctacaagagaagcgccaagaagtgcaaggagaagtttgagaacgtccacaagtactacaagcgcaccaaggaagggcgcgccgggaggcaggacggcaagagctaccgcttcttcactgagctggaggcgttgcatgccgctgcgccgcagacgccccagccgcagcagcagcagcagcagcagttgccgccggttacaagcagcgcacccgcgatgcacgccttcgcgccgccggttcccgcgccaccgccgatgagcgcaatgccaccgccgccggggccgatccagccggccccgatatcttctgcggctcccgcggtgcccctggagctgccgccgcagccgcccatcaacctgcaaggcttaagcttctcgtccatgtcggggtccgagtcggacgatgagtctgaagacgacgagatgacggcggagaccggcggcagccaggaccgcctcggcaagcgcaagcaggccccggcggcaaaaggctggcgactttcttcgaggggctcatcaagcaagtcgtcgacaggcaggaggagatgcagcggcggtttctggagactatggagaagcgagaggcggacgcacggccgggaggaggcgtggcgcaggcaggaggtggcccgcctcaaccgcgagcaggagcagctcgcccaggagcgcgccgcggcggcctcccgcgacgccgccatcatctccttcctccaacgcatcggcggtcagtccgtacaggtcccacccgccgccaccgtcatccagatgcccacaccggtgcagctccagacccctccgccggtcaagcaacctgccaggcagcaccagccacagccaacgccgccgccgccgcaggcggcgccaatcccggccgcgcccctccagcagcaaccgccgcagccgcagcacaaggagacgattcaccacgaggcagtgacgccgcgcagggcgccaccgacgtccggctcatcactcgagctggtgcccgcggcggagcagcacgtcgagagcgggctaggaggaggggagggcgggtcggcgtcgtcgtcgcggtggcccaagacggaggtgcaggcactcatacagctgcgcatggagctcgatatgcgctaccaggagaccgggccgaagggcccgctctgggaggagatctcgtcggggatgcggcggctggggtacaaccggagctcgaagcggtgcaaggagaagtgggagaacatcaacaagtacttcaagaaggtgaaggagagcaacaagaagcggcccgaggactccaagacatgcccgtacttccaccagctcgacgtcatctaccgcaggaagcacctcaccggcggtggcggcggcggcgcttccgcggccaatgtcgccgccacggcaatcgagcaccagaacccgaaccggcacgagatagaggggaagaacataaacgacaacgacaagaggaagaacggcggaggcggcggcgcgcaggtgcccaccagcaatggcgacacggcaccgaccacggccacgttcgacgtcgatagcggcatgaagaagccagaagacattgtgagggagctgagcgagcagccgccccgggagttcacaacggacgagaccgacagtgacgacatgggcgatgactacaccgacgacggcgaggaaggcgaggacgacggcaaaatgcagtacaggatacagttccagaggccgaacccgggcggcgccaacaccgcacctccgccggcgacaaccccggcgtccgcggtgccaacctcgactccgacgagcaccttcctcgccatggttcaataggcgcgcgaacgatgcatcaccaagtacgtacttgttcaaagaaaaaaaatcaaagcatcgccatcaccatcgcatcctctcactacaccaccaccaacacaaacaccatgcatgcatcagcaatcagcaaccactctccttcgagttgggatctctcctgtaatgcatgtgcggtaagtgccaatgacatgtgggcccggaataggtgggacccacatgccagtgacaccagtacagcagtggatttgcatccctctccttcaccttgtaattctcccgtgccattccattatttattgatttctctgtgtaataagagccctccctgatctcaccttaacccgaggaagcagagggggtggtagagaaaatgagtccgggtaactttatctctataggtcacctcgtcgtggtaaaggaagaattgtacatcgatgtaacagtccctgatgtctctgttttttttttctctctctctttttctccttcctccggcgacggcggtatacaagttgtatacgggtatacaacaattacatacatttccagcaatttggagcagaggtcagaaggtgtcttgtttttgtttcttttctttctttgccgtggggaattttgtctccttttaacccgttttttttgcagtggtataaaacgttgttactgtgcaaaaaaaaaaaaaaaaa

SEQ ID NO: 188 - DNA, 995 bp, Synechocystis PCC6803
  CDS (9)..(992)
aaggtactatgtctgaaaattttgcagttgctacgccggtgcgggtcggaattgtcggtactggttatgcggcccaacgtcgggcggaagttttccggggcgatcgccgtagtcaattggttagtttttggggcaatagtgaagccaatacagctaaatttgccgatacttttggagttagaccccagcaatcttggcaggcattaattaatgatccagagatagatttagtgctcattgccaccattaaccaactccatggggcgatcgccgaggcggcattgcaagccggtaaacatgtggtgttggaatatcctttagcgttaacctatgccatgggcaaaaaactacaacagttagcccgggaaaaaggtaaattactgcatgtggaacatattgaactattggggggagtacaccaagccattcgccagaacctaggcaaaattggtgaggttttttacgcccgctatagcaccatcatgggacaaaatcccgctccccaacgttggacctatcaccatcagcaatttggctttcctttagtggcggccttgtcccgcatcagtcggtttacggatttattcggtacagtacagcaggtggatgcccaatgtcgtttttgggatcagcctaatccggaatattttcgggcttgtttagccaccgcctatctccagtttaataatggtcttaaagcggaggttatctatggcaaaggggaagtttttcaccagaatgaacggatttttaccctccatggcgatcgaggcaccttaatttttgtcggggaaacaggtaggttaattcagggacaaacggaaactgaaattaccgttggtagtcgtcgaggactgttcagacaagacacggaagcagtgttggattatctaaccactggtaagcccctttatgtggatttagaagctagtttatatgctttagaagtggcggatctctgtgcccaagcttgtggatataaggttgaaaattag

SEQ ID NO: 189 - DNA, 9979 bp, Oryza sativa
  CDS (4626)..(6690),(6913)..(7729),(8011)..(8307),(8410)..(8617)
gaattcccacaggagctaggatcagatcacgcgatgaattgtgcctgatcccagtcttcaaaagcggaaaagaaaaaaagaaaagccaaaccccgttgcgagccgaaagcatccgagagccccagacgcgggggcatgggcgttcacgtgcgggtcacatggccatgtccgcaagtggaaagccccaaataccaaacccctaggagggccacgggtgcactgtcacccaaaagtagtaagaaattcttttgcagctaacgaaaaaggaagtcgaaaaagaaccaaagcccaaagagcaagtgcaactccaactcttggccactgctccctcgctctacttaattaaaccccaattagatgatggtgataatgatggcactaacgctaatctcgatctataatctagtaatctctactaaccccgagctgttcgtccaatagagtatcatggccactggtgtacagctgcgtactattactaaatttgtaagtttgttgggagtttttctatgcgttcttctgtcccaatcagcttacggattgtgcttaaagaagggaggagtactagtttactacgcaggctattgggttaagcaggacaggttaaacagttttgctaagtcacttttttctattacgtgattacatttttttaggagctattaagtgattattactaggactgagttcggtagacccgctgagttagcttggattttggacgtcatgcgaaaaaaacatattagtgcataattaatcgattattattataaacttggaaaaaatatatttattttttaaaaaatcacatgaaatacgctatttaattgttcaggaaacgtgattaaaaaagaagaaagataccgtttaccgaactcagcctaactctctcttgtatgtactccatgtttcatatctctttctcattaacttttctatttatgtgtggaagttacactagcaatttttccaaggattttaagtacataagcaagtactgaagtttcgtaagatttaaaaatcaggctataaatatttaaaatttatattacactacatataattcatagtgtaaatatatacagaaattttggtgtcctttaataaaaacacggtcataaatataacggccaatttatttggtcttattgttaaaaaatccacgaagtaaaaaaaatcatcttattgatacatttattatcacgtaagatggtattttacacctcacgtatccatcttgcaatggtattttctaaattttatttttcctaatacaaacttattagtatattttgagattgaacacgtcatctactacttaaaaaagtaattagggtgtgtttggataatgaaaaatagggggtgggattgggattagtaaatgaacgaagggttaggattaaatgaaagagagagaatgaatgattaagatttaaatatatcttttggtgggtgggaaatcatttccctatcccattagccaaacattgctttagtcataggtgaatagatcccactacaagaaactcaatcagttgatctacgtttattttacatgttttctaaattttgctcttcgtattatatatatatatatatatatatatatatatatatatatatatccccctaggttaattattggcggtaattaactccaggttggcgtcgaggtaaatccgcgacacctcacctccccacggcgaccccatccgcgccggccggtgatcggggtgatgggggaaggatggggccggtgcgtgcgtgcgatgcgacgcgagccccggcctaagcacagcacagctgactagctgagcccccacaccatcacaggctaggctatttatttattcagctcgccactgccacccgagtgcggctgccttggctttgtctcgtcccgtctcgtctgcctcctcctcttcttcccgcacagtccacacgtccgccactactggagcagagctgagctgagccgagcaggtaccccggtcgatccctcctcttcccccatctttgctgctcttcgcttgtatggttggatgctgccttagctagcatcatctgctgcttgttcgtttcttggagaggaacgggctgtgctgccctgtagtgtggtgttctctttctctgatgattttgggggggacaagagatgtggtgagagatgtttgggagttggggactggagggtcctcttgtttagttcgtattttttgtgatcagggcttagcatctttgagcttaacaaaaaaacttgaacttgtatgcgagtgtgatgaactgatgattgatgattcagaaatcccctttcctggggtttgtgatggatggcaagcaaagaggataaaattcggtgcttgtctctgttgagatgggtttttttaggatttgtttagtggtggatttcttggactttgggtgccactgggtggttcttggtagagggggtactgcttcagtgcttctatccatgtgccacgtcagtgtccactgactcacccccaagccttggtacaggaagaggataggaacaaagatgaggggtagtggaaagcagcaggaacaacttgctgatcctggagaagtgtgctgttgcagaaatattgagaagatttaatctggctttgcttagttgttgttttttattgtcagaaaagccataactcaaaatccccatatgttgggagaaagagaaaacaaaatgatgagttcaattgaaaatgttgctacataagagcctactattggaggagtgagtagtccaaactccaaacgatgttgctcgtcctgttaaggggttttgctccaaatttggacttgcaaacaagttaagccacaagttgtttttttagccactgttgtatgcacagcaaagacttataaaacctgtttcagtaatataataagcggcttcagtttttttttagataagcgactcttttatgctttctataaaaccttccaaatgataaaaatgcacttgatgctgatcattcgtattagtccatcatactaatttcatggacatgctaagttcagctgtttagagcaagtccgtcttctgtgatgtctgtgaacttccattcagctaagatatttcacctttttattagtaactacaactgaatatggtttgtagtttctttttggtaaaaaatatagttccatgagatttttagataatgggaaatccgggtctttgcatcagcagatattacaacccaccattacaaaatttgcagcacgtctggctgaaagtaacaaacaccaagaggacaagaaaaccatacgaaaacattgacataaggactaattaaaagaatcaggaatcaatcatatttctaaatctccatccacggcgaagatttgcatgatcattgtctcaaaagtccgccatgcaaactggatattgtccttgtcctcacacttttgcaactggtcctaaaactgatcccagtatgtggcccagtatagtaccttcatatgagatttagttggggttttggtccatgagactagtgaaagtgcagcctccgtgagtccaaggtacctttgacggcttatttcaattattattttaaatgaaaccctttaaaaattatattactttggaaaatttttttccctaacagatctattgttgctgtttttacagcgccaatctaaatagttttatgtatagtggtgaaagactcgaagttgtattagattaccatttaccatgcccatgtcagagtggcatacatgtgttaacagagggaatattaggctgaaaaagagtaaatctaaacatcaaactagcagaatttccaagcaattatgcagttagatactaataacatgtttgtatcgaaactaatatgcaacagtgtttcttatgaaatagctctaatatatatcctattaatctcccacactataatctagatccaccacaataagtataatggatatgttttagcgttcctccaatcaactagtagtaatttatagaatgtggaagctttccttttatactgtttttagaatgtaaacttgatttcctgcatttcatgcctttgaaaatcttaaagactggccatgtaatgccaatgaaaatcagatgaatgacaaatacaaagtagagaatatcttatcacagattagtgaaggaagttcctcagaaaggttttggctttacaggagatgtcatgcttatttgctaacacaagtgcctgcagttgtatttggacaaactttagtcctctaatgctctaagatttgttgaccgttcttcaatagcatctttaacattgtattattttacttcgtcaactgttcttacctcatccatcgagttctagcagggctaactttttatatttctcaagctcttgaaagacaaaaacatttctcttttctgaactgctcaggcaacaaggaagtctaatcatgtggttttaggcattgatcaaagttgatagtccacatttatccactagattgaggcatctattgatattagtggattgctatacttttttgttttactgattgatgttttcaacttatattatcttgttcagcaggagtggtatacagcagataagactcttgagtgattcaggtaatcaaggcagaagatgtcttcttcaagacctactcaatgttccagttcatccagcaggacccgccaaagctcccgggcaaggatattagcacaaacaactcttgatgctgaactcaatgctgaatatgaagaatatggcgactcctttgattactccaaattggttgaagcacagagaactactggacctgagcagcaagctcgttctgagaaggtcatagcttacttgcatcacattcagagagcaaagctaatccaaccatttggttgcttgttggcccttgatgagaagaccttcaatgttatagcgctcagcgagaatgcaccagagatgcttacaactgtcagccatgcagtgccaagtgttgatgatcccccaaagctacgcattggcaccaatgtacggtctcttttcactgacccaggtaccacagcactgcagaaggcactgggatttgctgatgtttccttgctgaaccctatcctagttcaatgcaagacctcaggcaagcctttctatgccattgttcatcgggcaactggttgtttggtggtagactttgagcctgtgaaacctacagaatttccagcaactgccgctggggctttgcaatcttacaaacttgctgccaaggcaatctctaagatccagtcactgccaggtggaagcatggaggtgctatgcaatacggtggtcaaggaactctttgacctcacaggatatgatagagttatggcttataagttccatgaagatgaccatggtgaagtctttgctgagatcacaaagcctggtcttgaaccttatcttggcctgcattatccagctactgatatccctcaggcagccaggtttcttttcatgaagaacaaagtccggatgatttgtgattgccgtgcaagatctatcaagattatcgaagatgagtcgctccacttggatattagcttatgtggttcaacactgagggcaccacacagttgtcatcttcagtatatggagaacatgaactcgattgcatcccttgtcatggctgttgtggttaatgagaatgaggatgatgatgaagttggggctgatcaacctgcacaacagcagaagaggaagaaactatggggactccttgtttgccaccatgagagccccagatatgttcctttcccattgcggtatgcctgtgagttcttagcacaagtgtttgctgtccatgttaacaaggagtttgaattagagaggcaagtacgcgagaaaagcatattgaggatgcaaacaatgctctctgacatgcttctcagggaatcctctcctctgagtatagtatcagggactcccaacatcatggaccttgtgaaatgtgatggtgctgctcttttgtatgggggaaaagtgtggcggctacagaatgctccaactgagtctcagatacgtgatattgccttctggctgtcagatgtccacagggattccactggcctgagtactgatagcctacatgatgctggatatccaggagctgctgctcttggtgatatgatttgtggaatggcagtagctaaaataaattccaaggatatcctgttctggttcaggtcacatacagctgctgaaatcagatggggaggtgcaaaacatgatccatcagacaaggatgacagcagaagaatgcaccctaggctgtccttcaaggcattccttgaggttgtcaagatgaagagcttgccttggaatgactatgagatggatgctattcactcattacaacttatacttagagggacactgaatgatgacatcaagccaacaagggccgctagtttagataatcaggttggtgatctcaagcttgatgggcttgctgaattgcaggcagttacaagtgaaatggttcgtctcatggaaacagcaactgtcccaatcttggctgtagatagcaatggattggtcaatggatggaatcagaaggttgctgagttgacagggttgagagtagatgaggctattggaagacacatacttaccgttgtagaggaatcttctgtaccagttgtccagaggatgctgtatttagctttgcaaggtgggtaaattagctatagtggtttttgtctattcccccagtatttttcaagtttctgcttatttggcaattcgatttatcaaaaaaactttggggttgctttctaatgttcaatgcctagcttgttatatgtacatttgattgtcatgctcatacattaatacttgacattcagctgcgttgtgggttgattgatttctaaacatttctttgattgatcaggcaaagaagagaaggaagtgaaatttgaggtgaaaactcatggctccaagagagatgatggccctgttatcttggttgtgaatgcctgtgccagccgggaccttcacgaccatgttgttggtgtgtgctttgttgcacaagatatgactgttcataagttggtcatggacaaatttactcgggttgagggagactacaaagcaattattcacaatccaagcccgcttattcctcccatatttggtgctgacgaatttggatggtgctctgagtggaatgctgccatgacgaaattgaccgggtggcatagagatgaggtgatcaataagatgcttcttggtgaggtgtttgatagcaccaacgcctcctgtcttgtgaagaataaagatgcatttgtaagtctctgcattcttatcaacagtgcattagctggtgatgaaacagaaaaggctccattcagcttcttcgaccggaacgggaagtatatcgagtgccttctttctgttaacagaaaagtaaatgcagatggtgtcatcactggagtattttgtttcattcaagttcctagtcatgagctgcaacatgcactacatgtgcagcaagcctcacagcagaatgcactaacaaagttgaaagcttactcctacatgagacatgcaatcaacaaccctctctcaggtatgctttactctaggaaagcactgaagaacacaggtctgaatgaagagcagatgaaggaggtcaatgttgcagatagttgtcaccgccagctgaataaaatactttctgacttggatcaagatagcgtcatgaacaagtacttttcttaccaagtattctaagttactctcttaggctcttgtatttactttcagctacctttgttcttcatcaattgtcagacctaacaggtcgatggtgttgctcttatagtcttatgtgtttgtattatcttcaagtggtcaattttgctctctcaaaatgaaagaatttgttgcaccaagtcccagtggttttttactcattactcagtacaaaccttatatatatattattagttattatcttcaaactaatttcctgctgctgtgttcacaggtctagttgcttggatttggagatggttgagtttgtattgcaagatgtgtttgtggctgctgtaagtcaagtactcataacttgccagggaaaagggattagagtctcttgcaacctaccggagagatatatgaagcaaacagtctacggggatggtgttcgactacagcagattctctctgacttcctattcgtctcagtgaagttctctcctgttgggggttctgttgagatctcttgtagcctgaccaagaacagcattggggaaaaccttcatctcatagacctagaacttaggtatgttagtcatgacatttgcacgcttactcttctttctgttaagacagtcttgaggtataaaatgatgtgtattaactcttgtggatcaatgtttttcaggatcaagcaccagggcaaaggagtcccagcagatctgctgtcacaaatgtacgaggatgacaataaggagcagtcggatgaaggcatgagtcttgcggtttctagaaacctgctgaggctcatgaatggcgatgtccgacatatgagggaagctggcatgtcaaccttcatcctcagcgtcgaacttgcttctgctccagcaaaataatcatgaaatggtatgtgaaattacttaattgactgtttaggctgctcagtttgttttgcttgagaccctgtttagatgggacaaaaactttcaagtccctatcacatcggatgtttggacgtactaattataaatattaaacgtagactattaataaaacccatctataatcttggactaattcgcgagacgaatctattgagcctaattaatccatgattagcctatgtgatgctacagtaaacattctctaattatggattaattagggcttaaaaaatttgtctcgtgaattaggctttcatttatgtaattagttttgtaagtagtctatatttaatactctaaattagtgtctaaatatagggactaaagttaagtctctggatccaaacaccacccgagtccactgctgaaactgcgtcttttcctgactcgtgctctatttaagcggctacaagagtgcctatagaaccaccatgtcctgtaggcttcgcttcttccattctgattttttttagctacaaacatatttttctaccatttctgaaatacattggcttatgacatcctcttaatctgtacactttgtcacttggtacagatgactagcaaatatgatttatctaaattgctgtccattttagagataaaactacaaacaattgatttcatatatttatttctcttgcgaacaacttccactttttcaaagtaccagtgtgatacttttgctaaagagttgtgttttctgcagttcgttcgtatagccacgacggtcgttgtgcttaggattggacgtacttgcagactgaagattcactggctgcagataaatggttgactctacagataaatggtcgtatggcacatttggttatgtactgtcgtcttcttcaccatgctaatgtcagtatgtgtaatcttctaagttgcaaatgcgtgctgttgctcgcctgaactcattaagattggaagtgaaaacaccaatctgtaatatgctgtatcttgatgctgagagcattcaagttactactacatgaataaaatatggtttgactttactcactagttcgaaaagtagaatctaataaagcttttcttacttagggcctgttcttgattaaggtacggatttcacattggttttcgttagcacgttttctaaacctgctaaacgtcctgttttttgcaaaaaaaaaaaatctatatggagattgcttttaagttaaaataattaaaattttattaatcatgcgctaatcttcagtaaactcaaatgggacctttacaggccaagtggccaactaggaagtaagggcctggttgtgggagcttctggcagctggagattcttctaga

SEQ ID NO: 190 - DNA, 1012 bp, Zea mays
  CDS (60)..(725)
ccacgcgtccggtgctgtgctctgctctgctctcgcctcgcacggactcgtggtaaaggatggagaccatgtcggctctcgcgaggacggcgccgccccttgctgggaccattcgccggccctcatgcgcgctgaggccgacggcgtccctctccttcgccgccgcttcaacgacgccccgcggccggctcgggctggggctgagcacggcgccggcggggagcgggagggcggccagggctcgcgccgtcccgcggcgcatcgtcgcctcctcggaggttgagcaaagctacattatgatcaaaccagatggtgttcagcgtggtctggttggagagattatttctcgctttgagaagaaagggtttttgttgaaaggcttaaaacttttccagtgccccaaggacttggcgcaggagcattacaaggatttgaaggataaacctttctttcctaagctgatcgattacataacttctggccctgttgtctgcatggcctgggagggtgatggtgttgttgcatcagctcggaaattaataggagctactaacccccttcaagctgaaccagggactataaggggtgatcttgcagttcaaactggaaggaacgttgtccatggaagtgatagtcctgataatggcaagcgtgaaattgaactgtggttcaaagaaggcgaggtctgccaatgggaatcagttcaagcaccgtggcttatagaataactattgctaatcatttccagagttgtattcaatgtttttttttgtgttcgtcttgattcaaggagccatgcaagagtgtatgagtttagttcggctaagtaattagctcatgagggcttgaattatcggttctttttgaggattgaggatttgtgcaactgaaacctttgatcagttgctcatgttgagaagctaatttcttgtcatatttacatgtaataaagtccctctactacagtaataaattagtatttcctctggtccaattaaaaaaaaaaaaaaag

SEQ ID NO: 191 - DNA, 1137 bp, Zea mays
  CDS (103)..(816)
attcggctcgagctcgagccgaatcggctcgaggcgaccgcaccggcacggcgcccatccatccatcgccatcctctagcccagtccaaaggaaccctagccatgagcgccgcctccaagaagctcttccaggccgccaggtccctcgtcctctccgcttctaaccgctccgtcctcgccgccgagggccgcaccgccgcgctcgccacgctcaccaactttggcaggaagaccctccccaccgcctacttatcctaccacaagcagggatcccaccatgccgcgtcggggtggggagccatcgccgccgcagtcccagctgcagtttacatgctccaggaccaggaggctcatgctgcagagatggagcgcaccttcattgccatcaagcctgatggtgtccaaagaggcctgatttctgagattatgagccgatttgagagaaaaggctataagcttgttgccatcaagctgattgttccatccaaagaatttgctgagaagcactaccatgatctcaaggaaaggcctttcttcagtgggttgtgtgattttctcagctctggccctgtgcttgcaatggtttgggaaggagagggtgtcatcaagtatgggagaaaactaattggtgccacagacccacagaaatctgaaccaggaaccatcaggggtgatcttgccattgttgttggaagaaacatcattcatggaagtgatggcccagagacagcgaaggatgagatcgctttatggtttgaacccaaggagctggtctcttacaccagcaatgcggagaagtggatctatggggtgaattaacgagagagtcaatctgttttttttccttcttttgatctcggttttcacataattgccgacagacctaggcacaaggatgtaataaagtcgctaccgtcacttctgagttggattgtgaccttcaggtgtagtaaggcacaaggaaggatggaaaggaaaggaatataccgtgaaatatagagcgtgcactgagtagtcgcgatgttcaaatcaaactatatatcaccgtcactggagtcatgtaatccaagatggtgatgcagatgtttctttggatctatttctctagatatccctaccaaaaaaaaaaaaaaaagg

SEQ ID NO: 192 - DNA, 658 bp, Zea mays
  CDS (49)..(495)
aaaaccagaccatcaaacaagtgccagcgccctctcgcagtcgccgcaatggagagcaccttcatcatgatcaagcctgacggcgtccagaggggcctcattggtgagatcatcagccgttttgagaagaagggcttctacctcaaggccttgaagcttgtgaacgtggagaggtcgtttgctgagaagcactacgccggatctcgcctccaagcccttcttccagggctcgtggactacatcatctctggccctgtggtggccatggtctgggagggcaagagcgtcgtcacaactggccgcaagatcattggcgccaccaaccccctggcttctgagcccggcaccatccgtggcgactttgctgtcgacattggcaggaatgtcattcatggaagtgacagcattgagagtgctaataaggagattgccctgtggttccccgagggccctgctgattggcagagcagccagcacccctggatctacgagaagtaaacatggaaagtttcacatcaaaccttgagagccagaggaagcatgtcaccatttgtgctttagcaatgttttcgaaaagattatgatctgtatcttggaaccttatttcaatggaccaaatttctttctttgccaaaaaaaaaaaaaaaaaaaaaaaaag

SEQ ID NO: 193 - DNA, 910 bp, Zea mays
  CDS (162)..(608)
ccacgcgtccgcccacgcgtccgcccacgcgtccgcccacgcgtccgcgcctctcctcctctcctcccccacccgtccatcgcccctccctccggtctgcgctcccacagcctcacccctgcgcccccgccgattcgcgtcgccctttgttggaaggaacgatggagcagaccttcatcatgatcaagcccgacggcgtccagcggggcctgatcggggacatcatcagtcgcttcgagaagaaagggttctacctcaaggggatgaagttcatgaacgtggagaggtccttcgcgcagcagcactacgctgacctttccgacaagcctttcttccccgggttggtggagtacatcatttccggccccgtggtggcgatggtgtgggaggggaaggacgtcgtgttgactggccgcaggatcattggggccaccaggccttgggaggcagcccccggtaccattcgtggggactacgccgtggaagtcggcaggaatgtcatccatggaagcgactccgtggagaacgggaagaaggagatcgctctctggttccctgaaggtgtggcacagtggaagagcaaccttcatccctggatctacgaggcttgagcagttgagcttggatgccttgcctgcttccatggaaaccagagttttgtttgagtattatctgttggctctggctgaagagtcataatttagcgctctgtgtgttacaccagagttaagtctgcctgaacttatgtggcatttgtttgagtttctaccttcgtgccctgttttctaatgtaccgtggttgtgaaccggtcaatgtgatctgaaataaaacattgcgtgccaagtttgtgttacaagtttgatgcactgggaatgccaggcaactaatgtggtaaaaaaaaaaaaaaag

SEQ ID NO: 194 - DNA, 2500 bp, Oryza sativa
  CDS (216)..(2093)
actagttgcttgcctcttcccacctcacctcgcattgcaatctcgcatcgcctcttccttctctttttccccttcttctccccttctcatccaacctcgcttcccaaccctggatccaaatcccaacctatcccaaagccgaaaccgaggagaggaaaaaggttacgcgcaattattactagctatagctaggtaggtttgggggaggcgagatcatgaagcgcgagtaccaagaagccggcgggagcagcggcggcgggagcagcgccgatatggggtcgtgcaaggacaaggtgatggcgggggcggcgggggaggaggaggacgtcgacgagctgctggcggcgctcgggtacaaggtgcggtcgtccgacatggccgacgtcgcgcagaagctggagcagctggagatggccatggggatgggcggcgtgagcgcccccggcgccgcggatgacgggttcgtgtcgcacctggccacggacaccgtgcactacaacccctcggacctctcctcctgggtcgagagcatgctttccgagctcaacgcgccgctgccccctatcccgccagcgccgccggctgcccgccatgcttccacctcgtccactgtcaccggcggcggtggtagcggcttctttgaactcccagccgctgccgactcgtcgagtagcacctacgccctcaggccgatctccttaccggtggtggcgacggctgacccgtcggctgctgactcggcgagggacaccaagcggatgcgcactggcggcggcagcacgtcgtcgtcctcatcgtcgtcttcctctctgggcggtggggcctcgcggggctctgtggtggaggctgctccgccggcgacgcaaggggccgcggcggcgaatgcgcccgccgtgccggttgtggtggttgacacgcaggaggctgggatccggctggtgcacgcgttgctggcgtgcgcggaggccgtgcagcaggagaacttcgcggccgcggaggcgctggtcaagcagatccccacgctggccgcgtcccagggcggcgccatgcgcaaggtcgctgcctacttcggcgaggccctcgcccgccgcgtgtaccgcttccgccccgcggacagcaccctcctcgacgccgccttcgccgaccttctgcacgcccacttctacgagtcctgcccctacctcaagttcgcccacttcaccgcaaatcaagccatcctcgaggctttcgccggctgccaccgcgtccacgtcgtcgacttcggcatcaagcaggggatgcaatggccagctctcctccaggccctcgcccttcgtcccggcggccccccatcgttccgcctcaccggcgtcggccccccgcagccggacgagaccgacgccttgcagcaggtgggttggaagcttgcccagttcgcgcacaccattcgcgtcgacttccagtaccggggactcgtcgccgccactctcgcggacttggagccgttcatgctgcagccggagggcgaggcggacgcgaacgaggagcctgaggtgatcgccgtcaactcggtgttcgagctgcaccggctgctcgcgcagcccggcgcgctggagaaggtcctgggcacggtgcacgcggtgcggccaaggatcgtcaccgtggtagagcaggaggccaaccacaactccggctcattcctcgaccggttcaccgagtcgctgcactactactccaccatgttcgattccctcgagggcggcagctccggccaggccgagctctctccgccggctgccgggggcggcggtggcacggaccaggtcatgtccgaggtgtacctcggccggcagatctgcaacgtcgtggcgtgcgagggcgcggagcgcacggagcgccacgagacgctggggcagtggcgcaaccgcctcggccgcgccggcttcgagcccgtgcacctgggctccaatgcctacaaacaggcgagcacgctcctcgcgcttttcgccggcggcgacggctaccgggtggaggagaaggagggctgcctcacgctgggctggcacacgcgcccgctcatcgccacctcggcatggcgcgtcgccgcggcgtgatcgcaaagtttttgggacgctgcaccacgtgtttgccgccgatcacggcgcgacccccccccccccccctctctctctccccggctcaccggcggcacaattgaagcttgacgtcaacgaacgctcaattgcagcgaccgatcgggcttacggttctcgccggcgtgaagagatcgacgactggactccgaccagaccgacggcttgttcgttctcctttcccaattaccccgttccttggtcctcctagcccatctattatgtttaaatgtcaattattatgtgtaatttctccaatcgctcatattaaataaggacgaaccgaactggatttcattagctccaatgagaattttgtatacaaggcaccgatctaaaaattgagctatatgttcatgagttaaaaa

SEQ ID NO: 195 - DNA, 828 bp, Zea mays
  CDS (91)..(624)
ccacgcgtccgcccacgcgtccgacttgagcagactagcaaggccttcagaccgggagggctccctgtcctgtcccccgcgccgccgcggatggccggagccaccacgccggcatcaggcgccctcgtcaggctctgcctgccttcgctcctcctctttctgtaccgatgtgaggctgttgagatggagagaacccttgcgatgatcaagcccgatggtttgtcaggtaagtacacagaagcaatcaaggaggtcatcttggattctggatttcatatcgtcaaagaaaccgaggtccagcttgatgctgagagggcatctgtcttctatgcggagcattcccagagaagcttctttgacagcctagtcaagtacataacaagtggtccagttcttgctatggttctggaaagacctgacgccgttgcgcaatggcgcactttgattggaccaactgatgcaaaaaaggccaaaacctctcatccaaacagcattagagcaatgtgtgggctggactctgagaaaaattgcgtgcatggttcggattcaccagaatctgcagacagagagatctcatttttcttcggagaagctgaatccgtaactgtggaacatgatgagctatagacgccacactggtatcaggcaagtcagcaaactgaattttgatgtgtctttgaactcttaggctatctcctgtagcttcttactcgtacccgtttcttattattttaaaagttattatgtaaacagtataatttatagtgcaaaacagtgtcttgcatggccatatgcttgtggcttcaaaaaaaaaaaaaaaaaaaaaag

SEQ ID NO: 196 - DNA, 2959 bp, Zea mays
  CDS (358)..(2613)
ggtgagcgagacagattccacagcaatttgctcctcttccacgcacaggcaagactgctccccagaaaagattgtagttttcatcgatttagccggtttctgcccggggggatcgctgctggagatctcagagaaccgggaggctccgagcttttgctccgtttgcgtcgaatctgcctcgggagcggagaaaggagcggccttccgagctcgtaggggccgtccctgagaaggcgagaggggacgcggcggcggcggagtcagctctagggcgctcgtggaagtcggtgatgccggtggtttgaggacgaggcggcctcggtggttttgaggaagccagcctctgccgcggcaaggatggactccagcggggaggaactcctgaagaagatccgggaactggaggttgggcaggcgcagctcaagcaggagatgtctaagctaatacccggcgctggggagcgtcggcgctcgcaatccgtctcgccgcggcgcggcgtgccggtgccgccgccaccgccggccaaggcgaaggcgggggcgccaggtaggcggctgtccggggggtttgagggcgggcagcgcgcgtgggcccgtgggtcggcgtctttcccgcactcatcaccgctgcagcgggagggccgcgcaggcgctggagacgctagcaccagcgctaggctgccggagaggcagtactccagggtgcttcagtcaatggggcagtccgtccacattcttgacctcgacgggaggatcatatactggaatcagtctgcggagaatctgtttggctatcctgcatcagaagcccttggtcaggatgccctcatgcttctggttgattcccatgaccacaatgcggtaaataacatcttccaacgtatttctatgggtgaaagttggactgggaagtttccagttaagaacaagcaaggacatagattttcagctgttgccaccaatacacctttctatgatgaagatggcagtttgatgggtttcatttgtgtttcaagtgattcccgccaattggagcagatattttgtaagcctccgacctctgcaaggtcccagtcagaatcatctatgacatcttgtgatgggagttgcagcaacactagtcacagaatcaattcgttgaatagaagttcttttgattctaatctacccctgcaaagcactttagcatccaagataacgaatttggctaccaaggtcacaaataaagttcgttctcgggtcaggacagacgagaatgacgatggtggcagtggtgagagccattgcttggatcgtggtgcaaaggaagagccaacatctagcggaacaagcacaccaagaggggatgcaccacatggtccctttgctacagaagagaactcacctgggaaatcaacgaacccaaacagcgacgaatcagaaggaaaagtaggtctgcacaagattttgggttctaaggcagaggcactattgaacaagaaagggatatcatggccttggaaagggcgcgagaatgagggacctgatgaaagaaaccatgtgatattgccgtggttgcatggtggccaagagaatggtgtgaatcatcagaaggtttctgattctagtatatctccagacgcccaaggcgctgaacacaaccaacctagcaaaaatgaggcatcaggttcctggtcctctttcaacaataacagcacaggcagtgcaagcagcacgggaagcactaatagcagtgctctctacaaagtagatcatgaagcagattgtctggattatgagatcctgtgggaagaccttgtcattggagaacaaataggtcaaggctcttgtgggacagtatatcatgctttgtggtatggttcggatgtggctgttaaagttttctccaagcaagaatattcagaagaagtgatactgacctttcgacaagaggtatcccttatgaagaaattgcgccatcctaacatactgctcttcatgggtgcggttatgtctccacaacgcctttgtattgtatcagagtttctcccccgtggaagcttgtttcgcttacttcaaaggagcgctaccaagttggatgtgagacggcgtgtccacatggctttagatattgtaaggggcatgaattatcttcaccattccagcccgcctatcattcatcgagatttaaaatcatctaaccttttggtcgacaagaactggattgtgaaggtggcagactttggtctttcacgtctcaagcgtgaaactttcttgacaacaaaaacaggaaaaggaacaccccaatggatggcgcccgaggtgttgcgcaatgaaccttccgatgagaagtctgatgtgtacagttacggggttatcctgtgggaacttgttactcagaagataccctgggaaaatctgaactcaatgcaggtcattggtgcagtgggttttatgaaccaaaggttggatatcccaagtgaagtagatcctcagtggaaatcaattatcctgagctgctgggaaagcgacccgcagcaacggccgtcgttccaggagcttcttgagaggctccgggagctgcagaggcactacgccatccagcaccggaacacaaagaacagcatcgaggagtaaagaacacaatgcgacctctcagagcggcttgcttcgaagcattttgcgagcgaacgaacgaagaaccccaggtctctagaagggcctggaccctcctgtactgtatggttttgcttctgcggaacagccaaggctggaagaagtttgttgtacagacgggggtacgttcttctttgtttgacagggcaattgtgactgtaatctctgggtcctgacacccaagggtagggtagagactatagagtgagtagtgactgagctccggattgctggcgcatttgggttcttctgattcgtggcaatgcaaatgcgtggttaacaataacaaaaaaaaaaaaaaaaa

SEQ ID NO: 197 - DNA, 1645 bp, Zea mays
  CDS (32)..(541)
cccacgcgtccgcccacgcgtccggccccgcatggcaccccaggggcggagagcgacgaggagatacggcggggtgccagagatgggcggcgcgtcggcgtcggcctcgtcgggcgccggcgcggacgagcgtcccaagggggaggacggcaagcaggggcaggtggcggcgggggcgcagcctccagcgggcgggaagaagcgcgggcgcacggcgggggacaaggagcagaaccggctgaagcggctgctgcggaaccacgtgtccgcgcagcaagcgcgagagcggaagaaggcgtacctgacggagctggaggcgaaggccaagggtctggagctccgcaatgcggagctggagcagcgggtgtccacgctccaaaacgagaacaacacgctccgccaggttatagatgttagtggaaaagaattcaaattcacctgggcatctggacgtggcgaattgtgtgatatttatgaagaacgtcagagtggagaggatggaaatgggttgcttctggagtgtggctctacttggcgcaagtgaaccctatagcctgggcagttcctacaaaacatgagggtgatgccagtgaagaagcttctctcgccgatgagacacttgcatcagaagtagtgctaacccggaagaggaaaataggaagctctttgtcagtagagccaaaccatctctctgatgaacttgaaccaaagttggaggatgcttagaacggggagacgtctaactgaaaagtaaaagtgggcagcatcgtgatgccaacttacccccctgccatggttttattggtcctctgcttgtttctcgttttccttgggagtcagcttctctgttttatgtggtcgcacacggccttatttgtagtattacaccacagaagctggctgacccccactgagggagaggtgattgatgcaagcattgtgtatgatccttggacaagggaatcgcgggggtttggttttgtcaccatggctgctactaaggaggcagatcactgcatcaaatatctggattgttctgtgttgcaagtactctacacagaacattttattgttttgtcttcaccaccgagaatccgagatcgcctcccatagcctccacatccataaggtcctgcttgactgcgacgacgtccaggctgatgccctcatcgtggatcgactcgcctcgctctagaaggagtggcccctctggagttgaatatgcagttataaccaatttttaccccttttatcctagaagagttgccaagacacggtataagaccatgataatagactaagagaggatttggctctaattactatatgttttatttatgcagtcccatgagaactttgagtatttgcagattgctttattaatttattaaagttaaagattgtatgtgttgagtatgtatccactcttgttggaagtgtcttgcaattccaatccaaggatgtataaaatactgcatgggctaagtatgtgttttttcatgtatttggagtatatatactttttgttgcttgagaacatgtatgtacactagaagcttgtcaattgtgtgaacttgagttgatccctgtctaacctgagtatatatatatatatatatatattttgttgcttgagaaaaaaaaa

SEQ ID NO: 198 - DNA, 2358 bp, Zea mays
  CDS (295)..(1929)
cagtgaggcacccctctcctggcctcttctcgccttctccgtttccgcgaacccagctgcctcgtagccccaccacaccgccgagcacgcggtctcccgcgccgccttccacccaagcgaagctacccctactcgacccagaattatcttctaccagcgctagtccgctccgcctctctactggctgccgtggagtggggatccgtccggacttccttctttcgctgttgatgtcatcatgctgagcattttgtggtagagacgatcatctctttgggttccagcatataactcatgcccataaaatttgcactagaaaatatgtcgacacaagcctctaaccggtcatacagatatccagacagaacccaactgccgtaccacaatggcaatccaatgcatgttgggggcaatggtaattactgtgtgcaacaaaatcacgatgatgttaactacatttcctctgatgatggatcacagagcagtagttctagagttcaagattttcaagcacagttttgcaccctagattcgtcttcggccaattgtgtttatcctgcacatagttctacctcttctcagagcataagtggaagccctctgtctcagcaggagagccactctgatcatgcatatggttcctctccaagtgcatcgtgcatcactcaggttcccacctggacacttaaggatctagaaaatgtgatgcttggacccgattctgacataggtagccctgacagttcctttctgcttgacactgccttgcatggaaataactggagagaacttttgggaattcaaactggggatttgaggcaggtaattgtagcatgtggtaaggctgttgacgagaatgctgtctatatggatgcattgatgtctgagttaagggagatggtttctgtctctggtgaaccgatgcaacgtctgggagcttacatgttggaaggcctcattgcgaggctttctttcactggacatgccttgtataaatctctgaagtgcaaagagcctgtggctacgagttctgagctcttgtcctatatgcatcttctttatgagatctgtccattcttcaagttcggttacatgtctgccaatggtgccatagctgaagcggttaagggggaagacattattcacatcatcgattttcaaatcgctcagggtagtcagtggatgactatgatacaggcccttgcttcaaggcctgggaggcgaccatacctaaggatcactggcatagatgactcgaattctgctcatgcccgaggtggtggactggatatggttggacagaggttgcacagaatggcccagtcatgtggtctgcccttcgagttcaatgctgtgccagcagctagtcatgaggttgtgtttgaagatctttgtctaagatctggggaggccatcgttgtcaattttgcttatcagctgcatcatactcctgatgagagcgtgggcatagaaaaccatcgtgatagaatactgagaatggtcaagagcctctctcctaaggtggtaactcttgtagagcaggaggcaaacacaaacacagcacctttctttcttagatacatggagactcttgattattacacagcgatgtttgaggcaatagatgttgcttgccccagggatgataagaagcgcattagcacagagcaacactgtgttgcaagggatattgtcaatttaattgcttgtgaaggtgcggaaaggatagagagacatgagccttttggaaagtggagggcaagacttgtaatggctggttttagaccatacccgttaagtccagtggtgaacagaaccatcaaaacactgcttgacagttaccacagccattacaggcttgaggagagagatggcatcctttatcttggctggaagaacagaaagctggtcgtatcttctgcctggtgctgatatttccaacttcttctaagaagcattgttaagattctttcgtggcttggggttcaggcgttcagcacatgaatccaaggtggaacctaaacttcagtatgaagactgcacaatcaaaaaaacaagctggttgcttccttactatttgttgcccagccttgaaactctcccacgctcactatcatcgctgatgtacttaccatgactcagttccatccttatatataggtgcaaacaatggtcttaatattgtatattggtagaatctggtggtattagcttccaaatctggattgctgaatcgtttgtgttactacatttagccaggatttgacagtagacacaaggagtgctgtaagatcctgtatgtacaacgtgcttcagttggtgtattgtacgtacttgggtgctaaaaaaaaaaaaaaa

SEQ ID NO: 199 - DNA, 2470 bp, Zea mays
  CDS (153)..(1934)
cgtagctatagctggctagcttcctcctcctggctagctgctacccttcccggttctcaccgcgctgccattaaaacccccttccttgttaccacttcgaccttgagcaagcgcactcttcatgttgccgcctcgccgcagtagcagcttacatggatacgctgtttaggttggttagccttcaagcctccgaacagcagcagcagcagcaatcggcgtcctacaactcgaggagcaccacgtcgagcggctccaggtcgtcgtcgcaccagaccaacgcatcctacaactactactaccacagcaacagcagcggcggcggcggcggcgggcagtactactacggtcagcagcacccacagcagcaccagcaccagcagtactacctggagccgtaccagcaagaagaatgcggcaacacccaccacctttacatggatgaagacttctcctcctcgtcctcgtcgaggcagcatttccactcgcacggcgcggtggtgcagccgccgacgtcgtccacggccacgcccacggcgccgacgccctcgctgtccacgtcgtccacggccgctggggcggcgcacgcgctgttcgaggcggccgacctgtcgttcccgcctgacctcaacctcgacttctcatccccggcctcgtcgtccggcgggggcgcggcctcgtcggcggcggtcgggggaggtggcgggggaaggtgggcgagccagctgctgctggagtgcgcgcgcgcggtggcgggccgcgacagccagcgcgtgcagcagctgatgtggatgctcaacgagctggcctcgccgtacggggacgtcgagcagaagctggcgtcctacttcctccaggggctcttcgcgcgcctcacggcgtccggaccgcggacgctgcgcacgctcgcggcggcgtccgaccggaacacgtccttcgactccacgcggcgcacggcgctgcggttccaggagctcagcccgtggtcgtcgtttgggcacgtggccgccaacggcgccatcctggagtcgttcctggaggccgccgcggcgtcgccggagccccagaggctccacatcctcgacctcagcaacacgttctgcacgcagtggcccacgctgctggaggcgctcgccacgcggtccgccgacgacacgccgcacctgtcgatcaccacggtggtctcctccgcgccgtccgcgccgacggccgccgtgcagcgcgtgatgcgggagatcgggcagcggatggaaaagttcgcgcggctgatgggcgtgcccttcagcttccgcgcagtgcaccacgccggggaccttgcggggctcgacctcgacgcgctcgacctgcgcgacggcggcgccaccaccgcgctcgccatcaactgcgtcaactcgctgcgcggcgtggtgccgggcggtgcgcggagacgggacgcgttcgccgcgtccctccggcgtctcgatccgcgggttgttactgtcgtcgaggaggaggccgatctcgtggcttttgaccccggcgcgcccgaggaaagcggcgacacggaggcagcgttcctgaaggtgttcggcgagggcttgcggttcttctcggcttacatggactcgctggaagagagcttccccaagactagcaacgagaggctggcgctggagaggggagccggacgtgccattgtagacttggtctcgtgcccggcgtcggagtccatggagcggcgggagacggcggcttcatgggcgcgccgcatgcggtcttccggcttctctccggtggcgttcagcgaggacgtcgccgacgacgtgcggtcgttgctccgtcggtatcgggaaggctggtcgatgcgggacgccggtttagacgactcggcagccggagcaggcgtcttcctggcgtggaaggaacagcctctcgtgtgggcgagcgcgtggaggccatgatagagatccccgtcgacgcaagatgcaagctcggtggagtacgcgcgtacgtggaacatcatgaaccacaggagaagcaagggcgccatccgccatacctagccggcgcgtggatgcaatgatccatgcagtggatcgggcgcacgtgcatgtgtatggcgagctgaatggcgcaacgcatctagggttttggagcagtagtagggattgctagttcacgcacacatggttgtatgcagcaaggtgatccaggaggaggtatggtcgatggttttaggttttagacttgcatctatttcaaatttggatcatcgatcgccacaagctcttggcgtgatgattccgattttcttgcttctttgtttttttttttttgtcacatttctctgtgtttcttcatgtaattcaaggttaacgactttcttccctctggagggatttacgtgcatggttttgtcatactttctctcattcctctgtttgcatttgcattgcatggttgttgagatgtcgcttcctaaaaaaaaaaaaaa

SEQ ID NO: 200 - DNA, 2537 bp, Zea mays
  CDS (520)..(2145)
ggccgcgaattcgcccttcgcggatccgacactcgtttgctggctttgatgggcgagctggaaggacggggttcgggcttaggctccagtgcctgttcggtggtcgcggtgctgatggcgatgaatgaacactgtggcactggaattagtccagcacgaacccaagttccaccagagccacacgttttcactgctcccacgaaggcacaccgcacacagccgcggcctgcaggcgacggtgacggcggcggcggcgctccatcctccgccccttcccttactcgcgttcggcacgcaggcgacggtgacggcggcggcgctcaggatcgggctctcagcgacggcggcggcggttttccctcccggctctcgccagtcgcctcgcgttctcgcctccggtcctccgaacgccggccggtgaccctgctggatgacatgagcacactaaatacaatcctgatgaagatggcaggattagcttcctgctgagttttgtcctacaagattgcaaagggcagaatgtcagctagggattctaatcattcatataaatgttcggatgattctcaaatgccgtactacaataactcagcacctgtaggagaaaatggtaggatccatatggcagaaaacagtctaggacatcattactcatcctccgatattggatcacaaaggatcaacaattccaaccctcaagtatttgaagcacagtactgcactctggaatcatcctcagcaaatggtgtttatcctgcacaaagctccacatcttctcatagcatctcccctttaagtgggagccccctgtctcagcatgacagccactcagaccacacatatagttctcctccaagtgcttcctgtctaactgaggttgcaggtctcctgattaaacaaaaagaattagagaattccattgttggacctggactggacattagttctgactgctctcggagcttgttgcaagcccatgttccagtgagaccagacaactggagacaacttctgggaattaatggaggagacttgatgcaagtagtcatagcatgtggtaaggctgttgcagagaatgatgtctttgcaacagaactgttaatatctgagcttggtcacctggtatctgtatctggagatccaatgcaacgacttggagcctatatgcttgaaggaattgttgctagactttcttcctccggcagtatgctatataaatctttgaaatgtaaagaacctacaagctctgagctcatgtcatatatgcatctcctttacgagatctgcccattctacaagtttggttacatgtcagcaaatggtgccattgccgaggctattaagggcgagaactttgttcacataattgatttccaaattgctcaggggagccagtgggttactctgctacaggcccttgctgcaagacctggggggccaccatacattagaatcactggtatagatgactcaaattctgcttatgccagaggaggcgggcttgatatagttgggaggacgttgtgtgatgttgctaattcatgtggtcttccttttgagttcaatgccgttccagctgctagccatgaggttgagcttcagcatcttgctataagacatggggagattattgctgtgaattttgcctatcagctacatcatgttcctgacgaaagtgtaagtacagaaaatcatcgggataggattataagaatgatcaagagcatcaatcctagggttgttactctcgttgaacaggagtcaaatacaaacacagctccattcttcccaaggtacatggaaactctcaactactatacagccatgtttgagtcgatagatgttgctctcccaagggatgataggaggcggatgagcgcagaacaacactgtgttgcaagggatattgttaatttaatcgcatgcgagggtgctgaaagggttgagaggcacgagctgtttggaaaatggaagtcaagatttgcaatggctggatttagaccgtacccactgagttcagttgtgaacaacactatcaacacattgttgcatacctacaacagctactacaggcttgaggagagagatggtgtcctttaccttggatggaaaaacagagtattggttgtatcttcggcatggtgttgacatttcctctgcaggttccatcgcactttggcctccatctgacgtttctaaggcaccattatgcttgtctggtatactcagtatatgcttgtatgtaatttgcaaccataccttacccaatggttatcttaccaactagatcttcatggcaaggtgaagtgtcacttaaaatctagaagttgtaactgtcgtgttgacgctagatatagatagttctgctttggtttgacatatgcagatgtgctgtaatgctcaggggttatgctaggcaggcccaagagggtgcctgtttgttatctatcaggctactgtgttgccgcctgctttgtgtgtgcatatatatttggaatgctactgtcctttctcaaaaaaaaaaaaaaaaaaaaaag

SEQ ID NO: 201 - DNA, 2385 bp, Zea mays
  CDS (131)..(2020)
ccctcccctaccctttccttccccactcgcacttcccaaccctggatccaaatcccaagctatcccagaaccgaaaccgaggcgcgcaagccattattagctggctagctaggcctgtagctccgaaatcatgaagcgcgagtaccaagacgccggcgggagtggcggcgacatgggctcctccaaggacaagatgatggcggcggcggcgggagcaggggaacaggaggaggaggacgtggatgagctgctggccgcgctcgggtacaaggtgcgttcgtcggatatggcggacgtcgcgcagaagctggagcagctcgagatggccatggggatgggcggcgtgggcggcgccggcgctaccgctgatgacgggttcgtgtcgcacctcgccacggacaccgtgcactacaatccctccgacctgtcgtcctgggtcgagagcatgctgtccgagctcaacgcgcccccagcgccgctcccgcccgcgacgccggccccaaggctcgcgtccacatcgtccaccgtcacaagtggcgccgccgccggtgctggctacttcgatctcccgcccgccgtggactcgtccagcagtacctacgctctgaagccgatcccctcgccggtggcggcgccgtcggccgacccgtccacggactcggcgcgggagcccaagcggatgaggactggcggcggcagcacgtcgtcctcctcttcctcgtcgtcatccatggatggcggtcgcactaggagctccgtggtcgaagctgcgccgccggcgacgcaagcatccgcggcggccaacgggcccgcggtgccagtggtggtggtggacacgcaggaggccgggatccggctcgtgcacgcgctgctggcgtgcgcggaggccgtgcagcaggagaacttctctgcggcggaggcgctggtcaagcagatccccatgctggcctcgtcgcagggcggtgccatgcgcaaggtcgccgcctacttcggcgaggcgcttgcccgccgcgtgtatcgcttccgcccgccaccggacagctccctcctcgacgccgccttcgccgacctcttacacgcgcacttctacgagtcctgcccctacctgaagttcgcccacttcaccgcgaaccaggccatcctcgaggcctccgccggctgccgccgcgtccacgtcgtcgacttcggcatcaaacaggggatgcagtggccggctcttctccaggccctcgccctccgccctggcggccccccgtcgttccggctcaccggcgtcgggccgccgcagcccgacgagaccgacgccttgcagcaggtgggctggaaacttgcccagttcgcgcacaccatccgcgtggacttccagtaccgtggcctcgtcgcggccacgctcgccgacctggagccgttcatgctgcaaccggagggcgatgacacggatgacgagcccgaggtgatcgccgtgaactccgtgttcgagctgcaccggcttcttgcgcagcccggtgccctcgagaaggtcctgggcacggtgcgcgcggtgcggccgaggatcgtgaccgtggtcgagcaggaggccaaccacaactccggcacgttcctcgaccgcttcaccgagtcgctgcactactactccaccatgttcgattctctggagggcgccggcgccggctccggccagtccaccgacgcctccccggccgcggccggcggcacggaccaggtcatgtcggaggtgtacctcggccggcagatctgcaacgtggtggcgtgcgagggcgcggagcgcacggagcgccacgagacgctgggccagtggcgcagccgcctcggcggctccgggttcgcgcccgtgcacctgggctccaatgcctacaagcaggcgagcacgctgctggcgctcttcgccggcggcgacgggtacagggtggaggagaaggacgggtgcctgaccctggggtggcatacgcgcccgctcatcgccacctcggcgtggcgcgtcgccgccgccgccgctccgtgatcagggaggggtggttggggcttctggacgccgatcaaggcacacgtacgtcccctggcatggcgcaccctccctcgagctcgccggcacgggtgaagctagacgtcattgagcgctgaatcgcagttagcgaccgggccaaggttctcgccggcgtgatgagatggaacactttgactcccgcggccggatcggcctgtgttcgttcttgtttccgatctcccttctctttcccgttgcttcgatcccgtcaagtatggtagaccgtagcctattgttatgtttaaatgtcaattattatgtgtaattcctccaagcgccgatatccaataaggacgaaccggattttcgttaaaaaaaaa

SEQ ID NO: 202 - DNA, 2315 bp, Zea mays
  CDS (266)..(1948)
cgtttccgcccgcgtcctcgcctcttctttcttcgcctcttctgcaccgcgctctcgctcgcccctccgccgcttggcctccaccctcccgctgccggctccgccgactggacttccgcccgtcgctggccgtcggcgcgcccgttcctcgcaggtgaattgttcaggctgaattgatcggtggaagctgtgcattgactatttttttaatctcagaatcaaagagagaaattgaactgggaggctgctaattgcgagagaagtgatgtctttcgttaggcaagcagacccatcagtgtcctgtgccgagaccacttacatccacaaatttgtgccaccaggaccagttttcccagcacagagatttgtctctggcaccgacttgcttcaccacgggcctcaaccatataatgctgagggctacaagcagtctggtttcaatggcacagcgcctcatgcatttcagagcttttacaatactgatagctatgctgaatctcactttaatgaagcaccatattctcctgcaatcttcgatatatctcagcagaactctcaatctttatcagacaaccaggcctctgatcttgtagagttcgatgaggatgagatgagagtaaagcttcaggagcttgagcatgctttacttgacgatggtgatgagatcttttttgacttgtcagggagcattaacgatgagtggaatgataacattaagacaaacaatgaatgggtcaataccatgaagaatattgtgagccccgactctccaaaagaggcatcacctgagtcaagcatctgctgtctcgacaacaatgttggagaagcgcggaacccgaaacagttgctttttgactgcgcagaagcgatatccgaaaatagcatcgatgaagcacagtcaatcatagcagaactacggcagaaggtggcaattcaaggagaaccttctcagagacttgcggcctatctcgtggagggccttgctgccacactacagtcttcaggaaagggcatctacagggccctgaggtgcaaggaggcccctactctgtaccagctttcagccatgcagatcctcttcgaaatctgcccatgcttcaggctaggcttcatggctgctaactatgctattctcgaagcctgcaaaggcgaagatgtcgtgcacatcattgactttgacatcaaccagggtagccagtacataactcttatccagttcctaaagaataacagtaacaagccacgccttttgaggataactggtgtcgatgatccagagtcagtgcacagagctgttggaggactgaatgttgttgggcagcgactagagaagcttgcagaggactgtgaggtacggtttgagttcagggcagtggctgctaacattgaagatttgacgcctggaatgctaggtcgccgtcccggagaggccctcattgttaactttgcattcctgctgcaccaccttcctgatgaaagtgtctcaattatgaaccaaagggatcggcttctccgtatggtgaagggtctccgaccaaaactagtgacgttggtggagcaggacgcaaatactaacaccaccccattcccttccaggttccgggaggtctatgactactattcggcactttttgattcactggatgccacccttccaagggaaagcccagatagaatgaacgtggagcgccagtgcctcgcacgggaaatcgtcaacatcttagcttgtgaaggtcctgaccgtgtggaaaggtatgaagtggctgggaaatggagagctagaatggcaatggcgggctttgtgtcgtccccatttaacagcggcgcgattgatggcataagatctctactgaaatcgtactgcgataagtacaggttcgagaaggtccaggacggtctccactttggctggggcgacaagacgctcgtcttctcttcggcgtggcaatagaagcttgcttgtactattgcctatctgagcactttccagcgtttttaggagcatctggggcaagggctgtaaagagatttctgtcgccgtattgttgacctaccatataagtacactcgtagctaaccttagcgtgctgcctgcctgtaggcttgtgacttgtgaggtctacggtttacctagtttcttagatgaaagtatgttgtgcattgtacacctactgaactacatgtagactgtagagtcgcgggtgtatttaattttgcccttcttttggaggggcagaatcacaatacgcgtgattggatacctggccgcgtgcgtctgggctctccacattccgttaaaaaaaaaaaaaaaaaaa

SEQ ID NO: 203 - DNA, 988 bp, Zea mays
  CDS (202)..(756)
ccaggccatcaggttatcgagaaagctctcgtctcttccatttctaggctagcctaggtctggaccagttaggcacgcaagtatcaatcgattcataagaggaggaggccattgagggagccaagtagaaggcagtcacggcaaaccacgtatcttgttgttagaaagctggtgagcaactttgtcaagcctcaagagctcatggaagatggcagtgctccaagacggtctactccacccgcccgcagaagcagatctgctgagttccacaatttttcagaaaggaggagaagggataagatcaacgagaagctgaaagcattacaggagcttcttccaaactgcaacaagaccgacaaagtttcgatgctagacgaagcaatcgactacctaaaatcacttcagctacagcttcagatgctggtcatggggaagggaatgtcaccagtggttccacttgagctgcagcaatacatgcattacatcacggctgaccctgcgcagttgcctccgttgcgcccctccggccagcagcaccggcaatttcagataactcaagccaatccccagagacaatctaacgtcgagtcggatttcttgagccagatgcagaacttgcactcttctgagccgcctcagaactttctcaggccaccgaaattgcaactttatacaccggaacagaggggtggcctacccagcacgagccacaacactggatggatttctgggagttcctcgtataacttcatggagtgatgtgctcctaatgacaaaatttgacacggcaagcgtgcaggcgtgcagccttgtactggcaagagattattcagtttgggacctgcagcatggttcacctgagagaattccatgaatgtgtagtactagttaactagctagctagttgtgttattaaataaaacgttgtgattgtgatgctgctcaaaaaaaaaaaaaaaaaaaaaaaaaaaaaaaaaaaaaaaaaaaa

SEQ ID NO: 204 - DNA, 2396 bp, Zea mays
  CDS (441)..(2102)
aacaattcgcccttactactatagggctcgagcggccgcccgggcaggtgccaccactaccagcctgcccgtgccgtgcccacgccccactgcacagcgcaccatccgcgcctcttctcttctcttctcctccccaaggccaagccccagccccagctaccgcgccccctcctgtctgttccaattccaccagcgtcggcctagctacctggccgtcccctctccgagtacggtcggaagcctcagctgaaggatctggacgacgggacaggttctgtttggtcttcataaagtagagcactagctagaagacatattcacacgcatcagctatcaaattgcaagcttagaattgacctcaaagttgggacatgcttgtcttaccagaagcaactgatagcttggagttgtagtccgtccggactgtctgctggaccagtatggctgacactccaacttcccgcatggtgcacccctttggcgacgtcccaaggcagactcccaagcaattcctgtattctggcaacccgcagcacctctgccatccgtaccagtcagctccggacacccatgtcgtgccgcagcgctgttacaccgtgaggtctcagtctcactcgccaaataatgctggttctcaagaccatgagactcacaagcagtacacgctggagtcctcggcggcttccggttgttcaaggcatggttctccctccagccaaagcgtccatgccgggagtggcagccctgtgtctcacgacgacagccactccggctccacgaacggccatggatcacctgtgagcgcgtcgtgtgtcaccggcgaggaccctactgatctcaagcagaaactgaaggatcttgaggctgtaatgctggggacgtctgagactgaccccgagatagtcaacagtctcgagatctccgcggcaaaccaactctcgttggagcccgaggagtgggagcacatggtgagcatgcccagagggaacctgaaggagctgctgattgcctgcgctagggcagtggaacgtaacaacagctacgccattgatctgatgatcccagagctgaggaagatggtttcggtgtccggcgagccgcttgagaggctgggagcctacatggtggaaggtcttgttgccaggctcgcggcctccggcagctcaatctacaaggctttgaagtgtaaggagcccaggagctctgatctcctctcctacatgcacttcctgtatgaggcctgcccctacttcaagttcggctacatgtcagccaacggcgcgatcgcggaggccatcaagggagaggacaggatccatatcatcgacttccacatcgcgcaaggggctcagtgggtctctctcctccaagcccttgcagccaggcctggcgggccaccgttcgtgagggtcaccggcattgatgattcagtctcagcttacgctcgaggcggcggtctggagttggttggcaggaggttgacacatattgctggcctctacaaggtgccctttcagttcgacgcagtcgctatctcaggcagtgaggtggaggaggagcatctaggcgtcgtcccaggcgaagccgtcgccgtcaacttcacccttgagctgcaccacatccccgacgagaccgtgagcacggcgaaccaccgggaccggatcctgaggctggtgaagggcctgtcgcccaaggtgctcacgctggtggagcaggagtccaacaccaacacggcccccttcgcgcagcggttcgcagagacgctggactactacacggccatcttcgagtccatcgacctggcgctgccgagggacgacagggagcggatcaacatcgagcagcactgcctggcccgggagatcgtgaacctggtggcctgcgagggcgaggagcgggtggagcggcacgaggtgttcggcaagtggaaggcgcggctgatgatggccgggttcagcccgtccccgctcagcgcgctggtgaacgccaccatcaagacgctgctgcagagctactcgccggactacaagctcgccgagagggacggcgtgctctacctcggctggaagaacaggcccctgatcgtctcatcggcatggcactagtgttgacttcagagaatgttgacctgatggagaatgtttcttgtaaccttcgaagtacctcttagtggtttagatatgtttggctggtcactggaactatctataggaagcctatggtgatagatactgagttgtagtagaacacatatagcctaaatgcctaatgctgtgatggcagtcactaccagcctagcctagaacaggttgatgatgtgtagtagtaagtttgggtatatgtttcagttaatcagtttaaaaaaaaaaaaaaaaaaaaaaaaaaaaaaaaaaaaa

SEQ ID NO: 205 - DNA, 2181 bp, Zea mays
  CDS (191)..(1900)
ccatcctaatacgactactatagggctcgagcggccgcccgggcaggtacacaaacgctagagagagagagagagagctggtggccggtgggacgtccgtggtggtggtggagttggatcggctgtgcttgttcctcgcttcttgctggatcagaggaggtcatgatcaactaatgcctattcatttattatggacttgcaccagttgttaaagtacagattaactggtgctaacgtctactacgaatttcctacagagaacaacttagcaaacactccttggccagctagtccactgaagtctgagttcagcagctcatcatacactcctctttcatcccagcttgagtgtgataatttgtctgcgctcagcaatactccagataaccagagctccacagaaaccatttcagcacaaccaatatcaccactggaagtagacagctcattcaaacaggcagctatccttcgggagaacacccaagtgagacctgatccattgtacacaacatcaaggcataatatgcaacacgctttacgagaaatagagactgttctgatggcacctgatgctgatgatgcagccactagcaccaagcatgaaattgaggaacataaacctgctcagctgatgaggcagcggtcaaggacatggagtcatgaatctaggcagccatcaccaggagttgtacggacacaacttgcatctggataccccacagcaagctatgagttccgcccagagaaacggctaagggagttaagggaggatccgcagagcatggtgaagcagctattaaccaagtgtgctgaagcattaagtgaggagaggatagaggagttccttaaccttgttcagcaagctcgtggagttgtatcaattactggggagccaatccagcggttaggtgcttacctccttgagggtttggttgctagacatgcaaactcaggtacaaacatatatcgtgccctgaagtgccgtgagccagagagtaatgaactcttgtcttacatgaagattctgtataacatctgtccgtactcgaagtttgggtatatggctgccaatggggcaattgcagaggcattaagaaatgaggacaggatccatattattgatttccagattgcccaagggacacagtggataacactgatacaagcgctagctgcaaggcccgggggtccaccacacgtgcggatcactggaatagatgacccagtgtcagagtatgcccgtggtgaaggtctggaccttgtagggaagatgttgaaaagcatgtctgaggaattcaggatacctttggagtttacccctctgcccggtatttacgcaactcaagttacaaaagaaatgctggacattaggtcaggcgaagcacttgctgtcaacttcactctgcagctgcaccacaccccggacgagagcgtggacgtgaacaacccacgggacgggctactccggatggtgaaaggcctgtctccgaaggtgaccacgcttgtggagcaggagtcgcacaccaacacgaccccgttcttgatgcggttcaccgagaccttggactactattcggccatgttcgagtcaatcgacacgaacctgccacgggacaacaaggagcggatcaacgtggagcagcactgtcttgccaaggacatcgtgaacatcatcgcctgcgaggggaaggaccgggtggagcgtcacgagctcctgggcaaatggcggtcgaggctgaccatggccgggttcagaccatacccgttgagctcgtacgtgaactcggtgatcaggaagctccttgcctgctactcggacaagtacaccctggaagagaaggatggcgcgatgctgctcggctggaagaacaggaagttgatatctgcttctgcttggcactgacagtaacgttttcagaagaccggaagtacacgtcaactcttacatatatgtatgtatgtatgtataatgaattacctggtctgctttccgcaaaaaaggacgccctttgttgtacatgtacatgatgctgtacccttagttttcctgaagtgcagaccagagaagagaatattgacattagattgtagctgctaagctgtatggtaattacagtttttcttttgctctcatgtattcacccctgtcatggacttcaaaaaaaaaaaaaaaaaaaaaag

SEQ ID NO: 206 - DNA, 3929 bp, Zea mays
  CDS (227)..(3139)
gggcgcgaggggcctcgccagcgtcggcctgtccaactccgagtccaggccggacagcgtgacgcagcgcggcgtggaccacggcgcggaagagagggtggaggagctcacattgaagaactgcattagcgctgatgctgcccagcccgaagcctctgctggtgggagcacgagcggtggggataggcctgctgttattaagggcctgtggggtaacttcacacggatggcccggagaaccagctatttggccagcagggaaaacgccgcactgagctatggcgacattgcaagctcgagggctggtgatgcttctagcagggaaaatctggcgacgagccttgccaacaatatcatctcaaggaacaacgatgtgtctggcaatgaggcacctacgagtcgtgtcggatatgtgaataatgagttcaagacgccatttcacagccagcagattctcttgtccccttggtctaatcaggacaacgctcttaaagtaagcagcttctcgaataggattcttgatcagatgagaagtaagactgtggcacccccatctggggttctagggtcaccgcttaaaagcaaatcaaaaggtaaaggggttgcataccaacgtgcacgggaggagatccgagtgcaagctaatgcaagacccagagaccctctggacaagatcccgacaattcctacctcaattcatgattctgtggccagagtggacatgcttttcagtactagtggagatgtttcaaaatcccactctgagggaactagcctgagggaactgattaagcctgggcggcaaacgatgtccaagtttgagaaattgcatttgtttaagcagatccttgatcttgtggataactgtcatgcacagggttttactttacaacatttgcgaccatcatattttacgatcctatcttcaaatcaagttaaatatatcggttcttataccacacaagatttgccaacatcaatcaaacaagagtttgctagagaagatcttgtgagtagaaaaagagcttttggccatagaattgattaccaagactctaatggccatggaaatttgatgctgaagcatcaaaaggttggtgagcaaggcttagttgctgtcaggcggctggcaaatacatttttgactgacaaaatacgcgacaatcaaattgaagataacgatccaggtatttcaaggcaagaaaattttagttacactaccagagaacattttaagttcgtcgaatcatatggcagcaatatgtccagtgctcagcatgtatctagttctggaacccaacaaccagcatttgaattgaggaatattgaggaaagctggtacaaaagcccagaggagctcagtcaatttaaaggcacacccccatcaaacatctatagccttggggttcttctatttgagctcttttgctgttctgagacatgggagatgcactgtgctgcaatgtcaaatcttcgccaacgcatccttcctccaaattttctttcagaaagtcccaaggaggctggcttctgcctttggttactgcatccagatccttgttcaagaccaaaagcaaaagagattcttggatgtgacttgataaatgagggtcgggatttgtccttgttagataagtcaccagtttccatcagtgaagatgacactgaatctagtttgctacttaacttcctttctcaattgaaagaagaaaaggagatgcaggctgccaagttatcggcagagcttggaagcttacaaacagatatcacagagattgacagaagacactcagcaggaatgagattgagtttagaggatatggatgtactgccaagttctagtttgccaggagcttctgtgagtgccctacagggtgcattgctgtcaggtttgctaccggcatcgtgcaagtcgagcatatatgaggagagggtaatgaggaatttggtgcagcttgaaaatgcttactactccatgaggtcctctgtggacacctgtgaaactaatgtaatcaaacgtccagataacgaggctttgagggtccgtgaaaatttccatcagcgtcacagtgattctgatgcaaagggagagaaaacagaccgtcttggatgcttttttgatggtttatgcaaatatgcccgacacaataggtttgaagtacgaggaattttgaagaatgcagatgtacttagctctccaaatgtcatctgttcattgagttttgatagggatgaagaatattttgctgctgctggagtttcaaagaaaataaaaatatttgaatttgatgcactcttaaatgatcgtgttgatattcattacccactggtagaaatgcctagcaagtccaagctgagctgtgtctgttggaacagctatataaagaactacctggcatcaacagactatgatggtactgttcagctatgggatgctggctctggtcaaggattcacacagtttacagagcaccgcaaaagggcttggtctgtgagtttttcacaagtcgaccctactaagttggcaagtggcagtgatgattgttgcgtgaaagtatggagtattaatcagaaaaactctattgatacaatccgaaacgtggccaatgtatgctgtgtacaattctctccatactcctcccgcatgctagcttttggttcagctgattacaaaatatactgttatgatctgaggaacacaaggataccttggtgtactatttcgggacatggaaaggctgtcagttatgtaaggttcttggatccagaaacacttatctctgcatcaaccgacaacacattgaagatatgggatcttaaccagactaattgcagtggattatctgctgattcttgcagcctgactctgaatggtcatagcaacgagaagaattttgtagggctatctgttcatgatggatacataacttgtggctctgaaaccaatgaagtgttttcttactacaaagatttccccatgccaataacttctcataggtttggttccattgacccgataactggacaagtgacaaatgaagacaaccagcagtttgtgtcgagtgtttgctggagagggaagtcaaacatggtagtggctgccaactccagtggcagcatcaaagtgcttgagcttgtgtgaatgatccaacgagagtgtcatattggagagaagaaggttctagggttgccatgcgggcctgtgatgctctcgtgccctcggtgatgctccaatggccctgcttatccggtgtctgcatcctcaatggaagcactaagcgaactgggtacctcttctaggtctgcatttcactgttttgccagggcactaaaagatgcgactgctctgtgcaagcaacctacagcaccgatcattggtcattattggaagctttgcttgaaactcccaagcgaaccaaagaaaaataaaataaaatcaagagtatgttgtgtttggaaatctctggcattttggcacggtaccttattcatcatcgtaaggagggccccaggtctgtacagaattagggggccatggggctgatgaaatagaacatgtgatgcatgcaaacttcttttgggctagagaggctgacggacgccgtggcgccttactgaatcagttgggaatttaactcagttttgatgtgcgccggacttgccatgactgttaagagcgaacgatggagagaaagaaatgatcctgtagctcgaagaagttaatcgtgccgtgtgaatgtttcaaggagaatgtgtgtagtaattttctttctacctcccttcattattgtacatatgtttagggctgcctaatggaaggccttgtaactagagtagagatgctcaaaagactcggtcatgagttcagtataatgaatgatcttctcaaaagattaattactggcagatttatacaaaaaaaaaaaaaa

SEQ ID NO: 207 - DNA, 1455 bp, Zea mays
  CDS (173)..(856)
ggcgccaacaaaagaggaagagtcaggccgaatgttctgcaagtcaagacgatgtaagcagaggatctgagatagggagtcggtggtatgtggctacgcacaccttgtacttactgctaacaattcgtaaaaaaatggttttgttcaggatcttgatgatgagtctggtgggatgcgaggatcaggcggcagaggtacgaagcgcagccgcaccgcggaggtgcacaatttgtccgaaaggaggagaagggacaggatcaatgagaaaatgcgcgccctgcaagagctcatccccaactgcaacaagattgacaaagcctccatgctggatgaagcgattgagtacctcaaaaccctccagcttcaagttcagatgatggccatgggaagtggactgtgcattcctcccatgctgctgccgcgagccatgcagctgcaaattccttcaattgctcatttccatcatctcggcatgggattgggttatgggatgggtgtcctcgatatgaacagcacagcggcagttccatttcagcccatccctggcgctcactatacttgtccgatgatcccaggcacgccaccacaaggtcttggaattggaatgcctggcacaaacacgatgccagtgtttggagtccctgggcaagcaatccatccctcagcgtctagcgtacagccattcccatcgttggcgggtcttcctgttaggccaaacctggcacctcaagtcccagccgtcatggctaacatggtgcaggagcaacagcaaggcgtagcgactcagcagcagcagagtctgaataatgaagctcaacagaaagcaaataccggagatccacaaatactacaaaaatagatgaagagatcttcgccagtaatcagtttctggatggtggtggcaacaggactaatactataggggaaaatgaggctgaaacattaaaaacggtcagcaagtgccagtgtgtaacctgactcgagctaaacttgacacaaatcatggaacttggcagagcgttattatcctaatagataacatggctgatgattttcaggtctcgactaacaagctgcaggtgtgaatatcagcaccaactcatcatggaagagcttaacaagtttcatgattcacgaagcagatctatcacttgaaaaaggtccaatcaatcaagatgtatttggtggcgggatgtctagcttagcgagataagatgctccaaagttttgtgtaaaatgtagatggaaccttgttacaagtaacatttcttgacagcggtgccgttttcaggtgtttttttttttgcttcactgaagttttcttgagtcaatatatcttattttcccaaaaaaaaaaaaaaaaaaaaaaaaaaaaaaaaaaaaaaaaaaaaaaaaaaaaaaaaaaaaaaaaaaaaaaaaaaaaaaaaaaaaaaaaaaaaaaaaaaaaaaaaaaaa

SEQ ID NO: 208 - DNA, 1355 bp, Glycine max
  CDS (78)..(932)
attcggctcgagtctcactcttcttgcagcatctctctccattaccttcataactcaatctcccattattattagagatgacggttgaaaaggaagatttgggtttgagtctaagcttgagcttccctcagaaccccccaactcatcttcatctcaatctcgtttcctcttctccttccagccacaaccctcagaaaccctcttggaacgaccctttcacttcttcagctggatcatcattccttcgaggaatcgatgtgaaccgtttaccttctgtggtcgattgcgaagaggaagcaggtgtgtcatctccaaacagcacggtttctagtgtcagtggaaaacgtagcgagagggaagaagccaatggtgaagaaaacgacacagacagagcttgttccagaggcatcatcagcgacgaagaagatgccgaaacctctagaaagaaacttagactctccaaagaccaatcaattatcctcgaagagagcttcaaagaacacaacactctcaaccccaaacaaaagttggcgctggcgaaacagctgggtcttcgagcgagacaagtggaggtgtggttccagaacagaagggcaaggaccaagctgaagcaaacggaagttgactgtgagtttttgaaaaggtgctgcgagaatctgaccgtggagaacaggaggttgcagaaggaagtgcaagagcttagagcactgaaactttccccgcagttctacatgcacatgaccccacccaccactctcaccatgtgcccctcgtgtgagcgtgtcgcggttcccccctcctccgccgttgatcctgccatgcgtcaccatcacgtgcctcctacacaacctcgggccttccccattggcccatgggccaccgctgccgccactatcccgcacaggcccttcgatgccctccgtcgcagatcttgactcgtcgaaacaaaatgacaaaatttgaaaaaaagaaaacggttgtaatagtaggaagccatgaattatgtgttcaaagtgtggtctaagatatggtggttaggaaaactgattttgtgggtctctaatgttttgtactagtttgacccttcgtctttgttttgggtttcggagcatgacctggtttagttagttagaggtttttttagtttgtaatacttactgcgttactctcatttctcatgattaaatcggagattctgtaaagttcagtagtcttaataaatattatatattacatataaaaaaaaaaaaaaaaaaaaaaaaaaaaaaaaaaaaaaaaaaaaaaaaaaaaaaaaaaaaaaaaaaaaaaaaaaaaaaaaaaaaaaaaaaaaaaaaaaaaaaaaaaaaaaaaaaaaa

SEQ ID NO: 209 - DNA, 2527 bp, Zea mays
  CDS (44)..(1954)
cccacgcgtccgcttcactcccaatccgaatccagatccgcgaatgctggggcgggcggcggcactgtccgcgccacggtggcgcggcggggtgccagaccttcgcgccgcgctgcggtcggggggcaacctcctcttcgcgctcttcgtggcggccgtgctcgcattcacgctcctcgcggcgttccacagccccgacgatccgctcctccacccgtcctctcaccagctcaccgatttcctcacctccgccacttccacctccaccttcctcactgacgactccgtgctgcgcaccggggaggacttcaactcctcgtccaccggcgccgccggcgaggtcgccgctgggggtgtcgaagtcgtcgcggaggccgtcccgttcatcaagctctccgaagttggcgccgaggccgagaagacggagcccgagacggagcgggccgtcaccgtcgacactgatgcggccacgggcgagggtgcagcggtggcggaggaaaccgccgttgcggaggcggtttcctgcgacacggaggcgcccgtggactgcacaggagacagggaactcttcaacctgctcatgcgcgcggccatcgagcggttccccgacctccacttctaccgctttggccgtcccgtggcggtgccggggagtcccatggagtgtgacctcgcgtggcgcttccgccccgctgccgacgccatcggcaccggccggaccacatactacaaggactaccgccggttcacgcttacccgcgacgtcaacacctgcagcctcgtcgtcgacaccgtgggtgaataccactcgggtgtgggtgccaagcgcaatggacggcgcaaggggaagaaagggaagaagggaaagcaggatgcacctgtgactgacttcgtgccggttaagacacagattaggctggacgagaacaccgccaacaatgaggctgctggggctgcagcggagccggtgtttgttgttggtgaggctgtcaatgacagcttgccagtggttgcttctgagtctgatttcagccgtggtaagtaccttatttacattggtggtggcgagaggtgcaagagcatgaaccatttcatttgggggttcttgtgtgcccttggtgaggcacaattcttgaaccggactcttgtcatggacttgaatgtctgcctcaatgcacggtatacttcgagtggcaaggatgaagaaagagatttcaggctctactttgattttgagcatttgaagcaatctgcgtccgtgattgaccagagccagttctggcaagattggggacagtggcacaagaaagataggctcaagaacttctacactgaagacatcaggatgaccccaatgaaacttcgtgacatcaaggacacattgatcatgaggaagtttgggaatgttgagcctgataactattggtcacgtgtgtgcgagggtgagactgagggaataatcaagcgcccatggcatttcctgtggaaatctcgtcgcttgatggagattgtatctgccattgcctcacggatgaactgggactttgactcggtccatgttgtcagaggggagaaagcgcagaacacacaactttggccaaaccttgacagagatacctcaccagacagtctccttatggcacttaatgataaggttggtgctggccggtatttgtacattgctaccaatgaacctgacaaatcgttctttaacccactcaaggaaaagtataaaacacacttccttgatgatttcaagtacctgtgggatgagaatagtgagtggttcactgaaactaaggagctgagcaatggtcagccagtagaatttgatggctatatgaggattgcagttgacactgaggtattcttgagggggaagaggcatgtggagacattcaacgagcttacacgtgattgcaaggatggcgtgaatacatgctcagcttcttcctgaacatttggtgggctaaggaaccttggagaggactagtaaggacttgggaaaggccaagatgtcaaggacgagaagctaggatattcacaacaagagaaatccaagtctgactcaacttcgtctccacctcgaagtctaggactagtctacactaaaacagacgcccaagatgcatccgaactccgattaggttatgctttatatggatggaaacctaaggagatacgctttccaacccaactggaatcaccttaaaattcatccggagtcaacaggaatcgtcgaaacaagttagcgttcagattctgttttagtgttgcaacaccgtatgttgggctgttgggccatgtatcgtgttggagcatattagggatgcaaccaaaggtcatgcacgcccctaatctctattttatcagcaaccaccaccatattagtgtttgggttttgcttagatcatatttgtcatctaagaatttgtcgttcatcagtttgtgataccccaactcgtaatcaacacagttttggttgtgttctttcaaaaaaaaaaaaaaaaaaaaaaaaaaaaaaaaa

SEQ ID NO: 210 - DNA, 2016 bp, Glycine max
  CDS (42)..(1820)
cctcaatttaattcccattccctctctcagaactcatcatcatggccgttgattctgaggtccctcgtgccgagaggagcgcaaaggctcttcagttcatcgaggaagttacaaaaaacactgactccgtccaggagagagtcctcaccgagattctcacccaaaacgccgagacggagtacctcaaacgcttcggcctcaacggcgccaccgaccgtgacactttcaagtccaaggttcccgtcgtgacctacgaggatctgcaacctgatattcagcgcattgcaaatggtgacagctctcccatcttgtgctctcacccaatctctgagtttctcaccagttctggaacatctgccggcgagagaaagttgatgccaaccattcatgaagaaatggaccgtcgtcagttactgtacagcctgctcatgcctgtgatgaaccaatacgtgtctgatttggacaaaggcaaggcgcttcacttcctgttcattaaggcagaggccaagacacccggcgggttagtggcgcgtccagtgctgacaagctactacaagagcgagcaattcaggaaaagaccattcgacccttacaacgtcctcactagccccaacgaagccatcctttgccccgattccttccagagcatgtacactcagatgctctgcggcctcatcatgcgccacgaggttctccgtgtcggagccgtcttcgcctccggccttctccgtgccataaggttccttcagctcaattgggaacaactttcccatgatatcctcaccggaaccctaaacccaaagatcactgaaccttccatcaaggaacgcatgtccaagatcttgaaacccgaccctcaactcgccgctttcattaaaaacgaatgctccgtggaaaactgggagcgtataattgtgaggatttggcctaacacaaaataccttgacgttatagtcactggagccatggctcagtatattcccacactcgattactacagtggtggcctacctaaaccctgtaccatgtacgcttcttctgagtgttttttcggcctcaacctcaaacccatgtccgaaccctctgacgtgtcttacaccattttacccaacatgggttacttcgagtttttaccccatgatgattcctctcctgttactctctccaaggactcaccgcctcgcttggtggaactcgctgacgtggaacttggtaaatactatgaactcattatcaccacctattcaggtctttgccgttacagggtcggtgacatactccaagtaactggtttccacaactccgaccctcaattccgtttcgtgaggcgaaagaacgttttgctgagcattgactcggacaaaaccgatgaagcggaactgcaaaaggccatcgagaatgcctcggagttgctgaaggagttcaataccagcgttgtggagtacacgagcttcgctgacacgaaatccattccggggcattacgtgatttactgggagctcatgatgaaggactcgtctcaccctccaacgaaccaagttctgaaccagtgctgcttggtgatggaagagtcgctgaactcggtttatagacaagggagagttgcggataactctattgggccgttggagatacgagtggtgaagaatggaacgtttgaggagttgatggactacgctatctcgcgtggtgcgtcgataaaccagtacaaagtgccaaggtgcgtgagcttcacgcccataatggagctacttgactctagggtggtttcttttcattttagcccagctgcaccgcactggaccccagaacgtcgtcgttgaaggaagctagggtaacgtacagcaataacatgcagtagtcatgcataagatctagtataataataaagagagaaaaaatgggtgacagaaaagggtagttgttcattgttgttgttatattatcactgccaaacccgaaagtgtctgtatttgttgatttgatatttccaatgagcttgtttttttcaaaaaa

SEQ ID NO: 211 - DNA, 7974 bp, Saccharomyces cerevisiae
  CDS (302)..(7714)
ggtaccattgtccatgacaacagcgggattgtttaagtatgacattgaatcctaatttcttgctcaatcgtgaggccttacggtagggccaattcttgattaaactactctcatatatttttgtttgaaacttttgaaaaggggttctcgccattttgaagccgcggacaccgggtgactactgaaagtccttatcgaagggtcttcttgagcttacgttaaaaaagagccatagtagcttcacgagagagtcattggtaaagtgaaacatacatcaaccggctagcaggtttgcattgatatggaaccgcatgaggagcagatttggaagagtaaacttttgaaagcggctaacaacgatatggacatggatagaaatgtgccgttggcaccgaatctgaatgtgaatatgaacatgaaaatgaatgcgagcaggaacggggatgaattcggtctgacttctagtaggtttgatggagtggtgattggcagtaatggggatgtaaattttaagcccattttggagaaaattttccgcgaattaaccagtgattacaaggaggaacgaaaattggccagtatttcattatttgatctactagtatccttggaacatgaattgtcgatagaagagttccaagcagtttcaaatgacataaacaataagattttggagctggtccatacaaaaaaaacgagcactagggtaggggctgttctatccatagacactttgatttcattctacgcatatactgaaaggttgcctaacgaaacttcacgactggctggttaccttcgagggctaataccttctaatgatgtagaggtcatgagactcgctgcaaagactctgggcaagttagccgttccaggaggtacatatacctctgatttcgtggaatttgagataaagtcttgcctagaatggcttactgcctccacggaaaagaattcattctcgagttcgaagccagaccatgctaaacatcgtgcgcttctgattataacagcgttggcagagaattgtccttatttactctaccaatacttgaattccatactagataacatttggagagcactaagagacccacatttggtgatcagaattgatgcgtccattacattggccaaatgtctttccaccctacgaaatagggatcctcagttaactagccagtgggtgcagagattggctacaagttgtgaatacggatttcaagtaaacacattagaatgcatccatgcaagtttgttggtttataaggaaatcttgtttttgaaggatccctttttgaatcaagtgttcgaccaaatgtgtctaaattgcatagcttatgaaaatcataaagcgaaaatgattagagaaaagatttaccagattgttcccctattagcatcgttcaatcctcaattatttgctggcaaatatttgcaccaaattatggacaactatttagagattttaaccaatgctccagcaaagaaaataccacatctcaaagatgacaaaccacagattttaatatcgattggtgatattgcatatgaagtcgggcccgatatcgcaccttatgtgaaacaaattcttgattatattgaacatgatttacagacgaaattcaaattcagaaagaaatttgaaaatgaaattttctactgcatcggaagattggcagttcccttgggccccgttctaggtaaattattaaacagaaatatactggacctgatgttcaaatgccctctttccgactatatgcaggaaacgtttcaaattctgactgagagaataccatcactaggccccaaaataaatgacgagttgcttaacctagtctgttcaaccttatctggaacaccatttatccagccagggtcaccaatggagataccatcgttttcgagagaaagagcaagagaatggagaaataaaagcatcctacagaaaactggtgaaagtaacgatgataataatgatataaaaatcattatacaagcttttagaatgttaaaaaatatcaaaagcagattttcgttggtagaattcgtgagaattgttgcactttcttacattgagcatacagatcccagagtaaggaaactagctgcgttgacatcttgtgaaatttacgtcaaggataacatctgcaaacaaacatcactacactctctgaacactgtatctgaagtgttatcaaagcttctagccattacgattgcagaccctttacaagatatccgtttagaagttttaaagaatcttaatccatgtttcgatccccagttggcacaaccagataatttgagactcttgtttattgcactgcacgatgagtcgttcaatattcagtcagtagcaatggagcttgtcggtaggttgtcttccgtaaaccctgcatacgtcatcccatcgataagaaaaatactactggaactgctaacaaaattaaaattctcaacttcttctcgagaaaaggaagaaactgccagtttgttatgtactcttatcaggtcgagtaaagatgttgcgaaaccttatatcgaacctcttttaaatgttcttttaccaaaattccaagatacctcttcaacggttgcatcaactgcactgagaactataggtgagctatctgttgtagggggcgaagatatgaagatatatcttaaggatttgtttcctttaattatcaaaacatttcaggatcaatcaaactctttcaagagagaagctgcacttaaggcccttggtcaacttgcagcctcatctggttacgtgatagatcctttactcgactatcccgaattattgggtatattggtgaatatattgaagacagaaaactctcaaaatattaggagacaaacagtcactttgataggtatactgggagctatcgacccatatcgccaaaaagaacgtgaggttacctctactaccgatatatctacagaacagaacgccccgcctatcgacattgctcttctcatgcagggcatgtctccttcgaatgatgagtattataccactgttgtcattcactgcctgctaaaaatcctaaaagatccatccctatcatcttaccacactgccgtgatccaagcgattatgcatatttttcaaacccttggtctaaaatgtgtttcattcttggaccagatcatcccaactattttggacgtaatgcgtacatgctctcagtcactattagaattttacttccaacagctttgctctttgattattatcgtaaggcaacacataagacctcatgtcgattctatattccaggctatcaaagatttttcttcggttgctaagctacaaataacgcttgtaagtgttattgaagcaatatcaaaggctctggagggtgaattcaaaagattggtccctcttactctgaccttgttccttgtaattttggagaatgacaagtctagtgacaaggtcctctccagaagggtattgagactgttagaatcgtttggtcctaacttagaaggttattcgcatttgattacacccaagatagttcaaatggcagaattcaccagcgggaacctacaaaggtctgcaataattactattggcaaactggccaaggatgttgacctttttgagatgtcctcaagaattgttcactctttacttagggtactaagttcaacaacgagtgacgaactctcaaaagtcattatgaatactttaagtctactgctaatacaaatgggcacatcctttgctatcttcatccctgtcattaatgaagttttaatgaagaaacatattcaacacacaatatatgatgacttgacaaacagaatattaaacaatgatgttttacccacaaaaattcttgaagcaaatacaacggattataagcccgcggaacaaatggaggcagcagatgctggggtcgcaaaattacctataaaccaatcagttttgaaaagtgcatggaattctagccaacaaagaactaaagaagattggcaggaatggagcaaacgtctatccattcaattattaaaagagtcaccctcccatgctctaagagcttgttcaaatcttgcaagcatgtattatccactagccaaagaactttttaataccgcattcgcatgtgtttggaccgaactttatagccaatatcaagaagatttaattgagtcattatgtatagccttatcttctcccttaaatccaccagaaatacatcaaacattgttaaacctggtagaatttatggaacacgatgacaaggcattaccaataccaactcaaagcctgggcgagtatgctgaaagatgtcacgcctatgccaaagcgctacattataaagagattaaatttattaaagagcctgagaactcaactattgaatcattgatcagcattaacaaccagctgaatcaaacggatgctgcaattggtatattaaagcatgcccaacaacatcattcacttcaattaaaggagacatggtttgaaaaattagagcgttgggaagatgcactacatgcttataatgaacgtgaaaaggcaggtgatacttccgtgagcgttacactcggtaagatgagatcccttcatgcccttgcggaatgggaacagttgtcgcaattggcagctagaaagtggaaagtttcgaagctacaaactaagaagctaatagctcccttggcagctggtgctcgtgggggttcgggagagtgggatatgcttgacgaatatatcagcgttatgaaacctaaatctccagataaggaattttttgatgcaattttatacttgcacaagaatgattacgacaatgctagtaagcatatattaaacgccagagatttgcttgtgactgaaatttccgcgttgatcaatgaaagttataatagagcatatagcgttattgttagaactcaaataataacagagtttgaggaaatcatcaagtataaacaattgccacctaattccgagaaaaaacttcactatcaaaatctttggacaaaaagactgctgggctgccaaaaaaatgtcgatttatggcaaagagtgcttagaataagatcattggtaataaagcccaagcaagacctgcaaatatggataaaatttgcaaatttgtgcagaaaatctggtagaatgagactagcaaataaggcattgaacatgctactagaaggaggcacgatcctagtttaccaaatacggtcaaagcctcctcccccagttgtttacgcgcaactcaaatatatttgggctacaggagcttataaagaagcattaaaccacttgataggatttacatccaggttagcgcatgatcttggtttggatccgaataatatgatcgcgcaaagtgtcaaactctcaagtgcaagtactgctccgtatgttgaggaatacacaaaattattagctcgatgttttttaaagcaaggtgaatggagaatagcaacacaaccgaactggagaaacacaaatccggatgcaattcttggttcctatctattggctacacatttcgataaaaattggtacaaggcatggcataattgggccttagctaattttgaagtaatatccatggttcaggaagagactaagctcaacggaggtaagaatgatgatgatgatgacacggcagttaataatgataatgtgcggattgacggtagtatcctaggaagtggttctttgactattaatggcaacagatacccgctagagcttattcaaagacatgttgttccagcgatcaagggcttttttcattcaatatctctattagaaacaagttgtttgcaagacacgttgaggttatcgactcttttatttaactttggtggtattaaagaagtctcacaagccatgtatgaaggcttcaatttgatgaaaatagagaactggcttgaagtcttaccacagttgatctctcgtatacatcagccagatcctacggtgagtaattcccttttgtcgttgctttctgatttagggaaagctcatccacaagctctcgtgtatcctttaactgtcgcgatcaagtctgaatctgtttcaagacaaaaagcggctctttcaataatagagaaaattaggattcatagtccagtcctggtaaaccaggcagaattagttagtcacgagttgatcagagtagccgttctatggcacgaattatggtatgaaggactggaagatgcgagccgccaatttttcgttgaacataacatagaaaaaatgttttctactttagaacctttacataaacacttaggcaatgagcctcaaacgttaagtgaggtatcgtttcagaaatcatttggtagagatttgaacgatgcctacgaatggttgaataactacaaaaagtcaaaagacatcaataatttgaaccaagcttgggatatttattataacgtcttcagaaaaataacacgtcaaataccacagttacaaaccttagacttacagcatgtttctccccagcttctggctactcatgatctcgaattggctgttcctgggacatatttcccaggaaaacctaccattagaatagcgaagtttgagccattattttctgtgatctcttcgaagcaaaggccaagaaaattctccatcaagggtagcgacggtaaagattataaatacgttttaaagggacatgaagatataagacaagatagccttgttatgcaattatttggtctagttaacactttgttgaagaatgattcagagtgtttcaagagacatttggatatccaacaatacccggctattccattgtcgcctaaatctggtttactaggatgggtaccaaatagtgacacattccacgttttgatcagagaacaccgtgatgccaaaaaaattccgttgaacattgaacattgggttatgttacaaatggcccccgattatgagaatttgactcttttacaaaaaattgaagtattcacgtacgctttagataatacaaaaggccaagacctttataaaatattatggttaaagagtaggtcgtcagagacatggctagaacgtagaacaacttatacgagatctttagcagttatgtccatgactggttatattctgggactaggtgatcgccatccaagcaacctgatgctagatagaatcaccggtaaagttatccacattgatttcggcgattgttttgaagctgccatcttaagagaaaagtatccagaaaaagtgccatttagactaactaggatgttaacatacgcaatggaagttagtggaattgaaggcagtttccgaattacttgtgaaaatgtcatgagagtcttaagagataataaagaatcattaatggcgatcttggaagcttttgcgcttgatcctttgatccattggggattcgatttaccgccacaaaaacttactgagcaaactggaattcctttgccgttgattaatcctagtgaattattaagaaagggcgcaattactgtcgaagaagcggcaaatatggaagcagaacaacaaaatgagaccagaaacgccagagcaatgcttgttttgagacgtattacagataaattaacgggcaatgatatcaagaggttcaatgaattagacgtccctgagcaggttgataaactgatccaacaagccacttctattgaaaggttatgtcaacattatattggatggtgcccattctggtgactgcggtgtcatttttcatttcgtgctttgtttactatttattttttttgtattacgcatttgtatacgtgtgcaagtattgtgtattattattattattattatcattatttttgtaatatctcgtcattatgtgaaatgaaggatgatataaggtacataaattgttgaaatcaacaccatttaaaacaactttattggatagatggcacatcggtacttttcacaataggtattgacaatatcagtccatttgttat

SEQ ID NO: 212 - DNA, 1123 bp, Glycine max
  CDS (85)..(861)
attcggctcgagttttttctttctccgccccttttttgttgttccttcttctcgttcgtcgctttgtgatctctctctgcaaccatgtccgtcgagaaagagagagagacccaggtttacttggccaagcttgccgagcaggccgagagatacgaagaaatggttgagtgtatgaagaaagtagcaaaacttgatcttgatctgactgtggaagaaaggaaccttctctcagtgggatacaaaaatgtgattggtgcacgaagggcctcttggcgcataatgtcctcaattgagcagaaggaagagtctaagggaaatgagcacaatgttaaactgatcaagagttactgccaaaaagttgaggaggaactctccaaaatctgtggtgacattctgactattatagaccagcatttgattccttcttccggatcagcagaagctagcgttttctactacaagatgaaaggtgattattttcggtatcttgctgagttcaagactgaccaagaaaggaaagaggcagctgagcagtcactaaaaggatacgaggctgcttctgccactgcaaacacagatcttccatcaacacatccaatccgtcttggacttgcactcaatttctctgtcttttattatgagataatgaactctcctgaaagggcctgccatttggccaagcaagcttttgatgaggcaattgcggagttggacaccctgagtgaagagtcatacaaggacagcactttgatcatgcagctgttgagagacaaccttactctctggacttccgatttaccagaggatggaggtgaggacaacataaaagctgaagaagccaaaccttctgagcctgagcattgatgtgattcagtagtcagaaatctaaggtactccccaagagggcatttttcagcttttcttgcaatggatttggaccggacaatagggactgtggtggccatttcataattcttgttctctcttaatatctttaccaaagccagaagatctgcacccttttttttcccttaaaactttttatttttattgccttctctgttttaagtggtcagttaagcaatgaacaatttacatttacccttaaaaaaaaaaaaaaagg

SEQ ID NO: 213 - DNA, 1179 bp, Glycine max
  CDS (42)..(824)
attcggctcgagcgtaaaccctaatttcggaaagatcggcgatgactgcctccaaggatcgcgagaacttcgtctacatcgccaaactcgccgagcaggccgagcgttacgaagagatggtggaatcaatgaagaacgttgcgaatctcgacgttgaactgacggtggaggagcggaatttgctttctgttgggtacaagaatgtgattggtgctcgcagagcgtcctggaggatcctgtcttccattgagcagaaggaagaaacaaaagggaacgagttgaatgcgaagcggattaaggagtacagacagaaggttgaattggagctatcgaacatctgtaatgatgttatgagagtgattgatgagcaccttatcccttcggctgcagctggtgaatccactgtgttttactataagatgaaaggagattattatcgttatcttgctgaatttaagtcaggcaatgagaagaaggaagctgctgatcagtctatgaaagcatatgagtctgctaccgctgcagcagaggctgatttacctcccacacatcccatccgattgggtctagctttaaatttctctgttttctattatgagatcttgaactcccctgaaagagcctgtcatcttgcgaagcaagcttttgatgaagctatttctgagcttgacaccttgaatgaggagtcatacaaagatagcaccttaatcatgcaacttctcagggacaacctaactttgtggacttctgacatcccagaagatggagaagatgcccagaaagtgaatggcactgccaagcttggtggaggtgaggatgcagagtgagtccgatggatgatggaatcttccataggattcgatgcatgcgtttgggaatgaaacatgagggccgattacttatctgtgtattagctagagatagggattctattgtttcctctttgtttcctgttggattgcccaatacttcccgataggggaaagagatactccatttgtgctatatttatggtatgtttttatttgtgtggtgtctggaaatggcctatttcattcccaatccgtttcctccagtctctgggggatttgattgatgagaattgcttatggtgggtgtatttccttttccaatgaaatgctacaacatttactgcaaaaaaaaaaaaaaaaaaaaagg

SEQ ID NO: 214 - DNA, 1092 bp, Glycine max
  CDS (49)..(834)
attcggctcgagctctcatccagatcttgcaaaaaaaaaaaaaacacaatggcagcgagcgctcccactccacgcgaagagttcgtgtacatggcgaagctggcggagcaggccgagcgctacgaggagatggtggagttcatggagaaggtctccgcctccgccgagagcgaggagctgaccgtggaggagcgcaacctcctctccgtcgcctacaagaacgtaatcggcgctcgccgcgcctcctggcgcatcatctcctccattgagcagaaggaggagagccgcggcaacgaggaccacgtcgccgtcatccgtgactaccgctccaagatcgaggccgagctctccaacatctgcgacggaatcctcaagctcctcgacacgcgcctcgtcccctccgccgcctccggcgactccaaggtcttctacctcaagatgaagggagactaccacaggtacctcgctgagttcaagaccggcgccgaccgcaaggaagccgccgagagcacgctctccgcctacaaagccgctcaggacattgctaacaccgagctgcctccaactcaccctatcaggctgggtcttgctctgaatttctctgtgttttactatgagattcttaactctcctgatcgtgcatgcagccttgcaaaacaggcttttgatgaggctattgctgaattggatacgttgggagaggaatcatacaaggatagcactttgatcatgcaacttcttcgtgataaccttaccctctggacctctgacatgcaggatgatggtgcagatgaaattaaagaagccgcacccaaaggtgacggggaacaaaattaaacataccatacttctaattagtgattgaacttcccttgtgtaatgttttcaaagggagaaggtgttgaatgctaatctcggtgttactgagattttgggcattcatgttcttcgttatgaattgtggatgtactgggctattttagtttgtccttccattagtacgcgtttctgaactgcctattttcataatgacactgaaatttccattataatgctgtttagaatattaagatataaaaaaaaaaaaaaagg

SEQ ID NO: 215 - DNA, 6501 bp, Oryza sativa
  CDS (654)..(1862),(2310)..(2426),(3407)..(3492),(3590)..(3752),(3845)..(3890),(4476)..(4522),(4985)..(5191),(5306)..(5392),(5473)..(5640)
agctaacctgcgtgatatttctaatcaattcgggaagggaaggataaaattgttttttgttgctatgtgttcgaatcttaatgttaatcacaccgcttaaccaaatgtcttctacagagttgtccctccgtcccgaaaattttcttcttcactgagaataccaagtttatttctcacctgcattttagattctcatcgacttgcacttagccaagaatctgttacacgaagaagggcaaatttacatgtattttcttcacagggagatttgcaataatgacattgtaaacattaacttttactataatgatataggatccatatttcatagacatagatgggtccatgtttgcagttctaatattataattttaaggataagggaattaatatatacaacgtgtcgaaattttgagtcaatttgccaactatggataaaaaattacaaattcaaaaagaaacttgttgcccgacagatcagcccacacaaagtttgaaggctaaaagcccaatctggggggcgcaagaattccagcccaagttataaaaatcacgaaatatcttggatctgacagtctgacagcaaaaggccacactcctcacaaatctcgtgcgcgccaccgtcatctccggcgaccacctcaccgccggccatgccattctcctacgccgccgcggcctctggctccgcgtcctcttctcgcaagccggttcccgtcgccgcggccgccgcccgccgacccgcgccctcgccggcagcggcggcggcacccgcgccctcgccgtcaaaccctagcgcggtctccgattccgacccctcctcgtactcctcctccggggaggagaccgacctcaccgcctccgatccggcggccgcctccgtcatctcctcctacctctccgttgcgggggatggcgccgacctctccaaggtcgggatcttcctcagctccgcggcgcgccgccgatcgccgccgtgcctgatatgcttcgatcccatccgcccctccgaccccgtctggtcctgctccgcctcctgcttcgccctcctccacctccactgcatccagtcatgggcacatcagtcatcctctgccgcgccttctcccacctggggttgccccaaatgccgcttcccctatcccaaatcccagactcccacctcctacctctgcttctgctccaagacggtagacccagctccggacccctggatcctcccccactcctgcggcgacgtctgtggccgacgtctcaatgcagaccgtgactctggctgtgagcacaactgcctcctgctttgccaccctgggccatgtccaccgtgcccggcaattgttccaaatgctatgtgcttttgcggctcacatcgtgagacgcgtcgatgctcacatcagcgttattcttgctcggggaaatgcaataaacgcctcggctgtggaatccaccggtgtcctgtggattgccatgatgggccttgcccgccttgtgcggtgcgaggaaagcacaaatgtgagtgtggagaaacaatggaggagaggctatgctctgaaagggtgttccagtgcaagagggagtgtggtgggatgttgcagtgtgggaagcatagttgtgagaggggttgccatgctggaaagtgtggaggatgcccactccaagggcgacgaacttgcccatgtgggaagaaagattatccaagtttggactgtgatgcagaggctgccacatgtggatcaacttgcgagaaggtgcttgggtgcgggcggcacaaatgcccagagcggtgtcatcgtggttcatgcgttgagacatgtcggcttgtgatcacaaaatcgtgccgctgtgggggtctcaagaaggaggtacaatatatcacacgttttttatgtcaaaattcttaaaaggaaggaaacaaggaatatgtttaaacccttcaagcagataaattaaacaaatcaattccttggttgtctaaaatgcaaaaagcaattagagaatgtcattgtcaattatgtttgatacattattagttaaaatgccttttaagttacttcacatagttctctatagttctaccgacctatttctatatttggaggcaagtatgcttcaaccgttctgagtggaaacaaaacagagtaaaaataagtaaaatcttctttctttatgttacctcaatctgggccagtatagtaaatactggttgtgcaccatcctagcgctggtattgaatgtggagggctgcagcttttgagtacttctctcttattagaatgcaaaccaaatttgttgttcatgtgatgctgcatcaggtgccttgctaccaagaattgacatgcgaaaggaagtgtcagcgtttgcgaaactgtggccgccatgcttgtagacgacgttgctgcgagggtgattgtgcaccctgcccagaggtaaatcctttctttggggggtgtgatgtattgatacctatcaattactaaagtagatttatttctgtttgtaggtttgtgacaagaggctcagatgtggcaaccataaatgcctatctccatgccacaggtattctcttaatcaaatatacatctttggcttgccatgttgaattgtttagtgctagtactgctaattgcattggtgcataccttttatacatatgttcccattttgagccatatttttgcaatggatgtaccacattgccatgataggttccacaaatttaagaatgctgttttgctctcagacatttgcactttattctcttttattccaaatttcaagactaattcaatgtcccgaatcataaatattcttgtttatccaaactgctaatatatgtgacaatatttttcttcattttgtttaacagaggtgcttgtgcaccttgtcctttgatgaagaccatttcatgcaactgtgggcaaacattttttgaggtggaattcggtacactctaaatatgttgtttgtttcttatgcatcccatgtttgatgatcacagcacttcacttgaacagcaagtttacaggaaaaaaagatattcagttagcattaggagtaccattgttttcatatgattttatgtactttgttaaaaaagttaattcttgtccgatccttccacacaaaacttgccttgtgactcgacttcttgtccaaaattcgtatgcacaactttgtatgtaggtgccctgtgggactgagaagaatcagaagccacccaaatgctcaaaaaaatgcaatatagctcgcctttgcaggcacaaacttgaatgccgggtaaacaattacatatctctgctttaaccttatcattaatgataatctcatctattttgtgtttagaaatttatcctggagcattttggggttctcttctataaattaatcctcagaattttcttcttagccccacaagtgccactatggagcttgcccaccttgcaaactaatctgcggagaagaactttcttgtggccacaggtgtaagctgaggtttgtattttgactattttctgaatgtgccagtgttggtaatttgccccaggagtatatccttctgatatgtaaccatccgctcgcactctgccaggtgtcatggccccattgctcctccaaatcctgagttcacactgaaaccaataaaaaggaaaaagggaaagcatatagactctacacctggaacaccatgcccgccatgccaagaagttgttttggtgccatgctttggacatcatcttggccaagaacgtgcagtaagtttcacccttcctcacacatccacactcatatgtgtgctccgtgattgctgagtgcctgagtgcatacaaattctttctccctgcagatactttgctccaaaaggaggcagtttccatgtcagaatttatgtggtaaccctctcaactgtggcaatcattattgtacgaaggcttgccatgtgttacagattccattgagtcagcctgaaggagatcaatcggctatactgtctcttgctagtgcaagtgcattcgctgagccttgcgaagaatgtaacctgccttgtcaaagggtcagtgttctttattgtccttagcaataactttggtttagttctgtttacagacttttaatgtgaaattttgtgcatggttccacatcttttaactttggtgcagcatatttggtatttaccatttctttcaggtcagggagcctccatgttcacatccctgccctttgccatgccatcttaacgattgtccaccttgcaaagcccttgttaaaagaccatgtcattgtggtgctatggtacacgcttttgagtgcatgtattataacaacttaaatgctacaaaacagcagaaagtaaggtcctgtggtggcccatgtcataggtcagttacttttttcctcggtcctatcatcttttttgaatgttggtaacattttccattgctgattttgtaagtttctttcatctgttctttttgcagaaaattaccgaattgtccccatctgtgctcagaaatatgtcaccctggtcagtgcccatcagttgatcagtgcatgaaaaaggtatcttggtgaaactagagttacctaattggcatgatatcacttggtaggcatatatttacattacataattagcatgacattattagcaacctgttctgtggcttagcgatactacaatttttacttgatgaaactggagtaaggtttggaactttgggatatggtccacttatgttctatatatatttttagcgagatcaatcacagaataccatagttgtttttacctctttcatgtaatgtaattaggcactaggctttctcttttctgtccttgtgcgctatcacaagaactttgctgtttttcttgaagaacttgcttaatgaaggcagagctgcttacactttacctaaaaaaaatcacaacatacttttgaaaatatgtattaatacatgttcctctacctatctgatatccattaaggtcaatgtccgttgtgcatgcaacaaccttaaaaaagagtggatatgtcaagatgttctgaaggaataccgtcagtctggtcgtgacccaaaacaaatacctaaaaatcaatatgcagttggcctacttgcctgtggtgaagattgtgttaaaaaggttaaagctgcagattctgagttgcatctccggaaaattcaggagatcaaggtactggaccttaccatctgaaccaaacttcataagttgttacactgttgtgcaaacaatcagctcttgtagttatttttgcttctgtgcttattggctgtaatttccatgtagacccctgctgtggaagttgaaaatgtgcccaagcgcaggaagaggcgtaaccgtggccaagaaagtgttgaaagctcaaaattccaggtgtgctagatactgatgtgctggtttgttatttgggttcgctaagcatgcgttccttacatgaactttatatattgcaggaaatcaaagctgttgcgttgaaatttctcctggttatttttctgtgcataatcgttgtagctggattgtaccttttgtggaaaggtgtttaccggctttctgattggatgaatgacatggaggagcagagggccaggcagaggcatttgaagcctggaagattgtaaattaaagactacggagggtgtttgtggaatattcacaactgagatgtgcatcggttcaccgtcagggattggtttcggatatatggtagtgaaagatgtcatcattttgttattggagccaagccccggagtttgtaactagtttggtctcttgtccgaagctactggttaatggaaactaaagttatccgtgtcaaaagaaagatatcattttgttctttgtttgccaaacaaaatgtaggaactcaacaaccttgtactgtagtttacatgcatactgtgttcgagtgaattaagggtgtgtttagttcacgtcaaaattagaagtttcattgaaattgaaacgatgtgatggaaaagttagaagtttatatgtgtagaaaagttttgatgtgatggaaaaattagaagtttgaagaaaaaattgggaactaaatcaggcctaattaaatgaacaaattctgtcaagtaattgatatacgataaccactgtaatttctacggtgcacataaatatccatcataataaggtacagccttacaggcgatcacatttctgcaccttttgcagtgttgagttctgttgcagtaataacacctagtgattcaggtaaaattggttttgttagtataataagtttatttttgttttgagagagagtacaaacacaagcgtttccgaggtacagcacctgcgtactcattcctataaacaagtgcacgtaaacggcacattttatttctatgagcactttcaacagactagatcggtatattttaaaattgataaagtcactatcgatgtcttaaccgactgatggtatatattgagattaacgaagtcatcaccgatgtctcgct

SEQ ID NO: 216 - DNA, 1585 bp, Oryza sativa
  CDS (199)..(1338)
gccaagctcgaaattaaccctcactaaagggaacaaaagctggagctccaccgcggtggcggccgctctagaactagtggatcccccgggctgcaggaattcggcacgagccgcgtcgcttcccttccttcgcgcggcgctgctccggtagggttttagccggcgatctctcccctctcgcgcgctcggcgactgagaatggtcgaggtggaggaagtcagcaacaagatgcaggtgcagatgcgcctccaccccgccgcggcggcggaggaggaggacgccgacctcccgctccccgccctcttcgacaaggcgtcccacctccactccctcgcctccagctcctccctcgaccaggaagggatccgcaagggggtcgacctgctgcggcggtgcgacgagatggtcagtaaggtcggcctcttctcctccaacgagaccaaggatgacatctccaccgccaacctcaaatacctactcgtaccgtactaccttggggaaatgactgaaagggtagcgcaggaagatcggatcccagtccttaaggcgtcgcaggatcatttgaaggaattcatttctatctgtgaagcactggagcttatatcagaggatgagcttgaaatatctaggcagaagaacctgataccatggcaaatcgaagagcacagaaggttgcacggttcaagcgccaaaaggctgcagaaacaaagctctagaatcaaggagaggaaagaaaggcgtaggcgtcatgagagcagctgcttatcagctcctattgagctgggaggagatcttttgaggatgatggagaaggaaagagaaggcatggttagctactatctcattggctctatcgaaggctttgaccttcttgacatgttaaagaaggaagaagaaatcgttccggcagtaaaagaaggaaagcgaaggatggtaatgcatttgctcgtgaaatgcttgatgaacgtacaaaaagggctgaagcatggcaccataatgctgccaaccgtgcaccatactccaaaccagctgatccaatcacttgtgcaactaaccagtgaaagagagagaatggcagcacaagtttttcagccaagttataggttgccaacgatgagcatagaagaagctggcttacgtgagatgaaaatgatggagaaatggcaagaaagaactgccaagatgattcaagaatcaaactccgcatggcacaaggatggcagtcggtcagcccaagaggacgaggacgccgaagaggagaaagcgagaggatgggatgactggaaggacgataaccctcgtggtgcaggcaacaagaagctcactccctgtggctaaattatatgctatggcaattctattgaacttacatctgaaactgaagctcgtgtaaaaatatgtggtttttactaactttccttactgcggcatttgttgattgctgagtaataatgtgttccatatgtatattataattgtgcatggtttccttctgccaatatatgggcaaccaagtaatgccagaaaagctgatttgagaagcaaaaaaaaaaaaaaaaaaaaaaaaaaaaaaaaaaaaaaaaaa

SEQ ID NO: 217 - DNA, 928 bp, Oryza sativa
  CDS (58)..(741)
ccacgcgtccgagctaattaaggcgcaacacagaaaccctcaccgccgcccgcatccatggcggaggagcacgagacgaggccgccgtccgccggaagaccaccgtcgtccggccgcggcagggccgacgacgctgacgagagggaggagggggagatcgccgacgacgactccggccacgcgccgccgcaggccaaccccgccgcgccgcacccgctcgagcacgcctggaccttctggttcgacaacccgcagggaaagtccaagcaggcaacctggggaagctccatccgccccatccacaccttctccaccgtcgaggacttctggagcctttataacaatatccatcacccaagcaagttggttgtgggagctgacttccattgctttaagaataaaatcgagccaaaatgggaagatcctatctgtgctaatggaggtaaatggaccttcagctgtggcagaggaaagtccgacacaatgtggttgcatactttattggcaatgattggcgaacaattcgattatggggatgaaatttgtggagcagttgttagtgtgcgtggcaagcaggaaagaatagctatctggactaaaaatgctgccaatgaagctgctcagataagcattgggaagcagtggaaagaatttctggattacaaggactcgattgggttcattgttcatgacgatgcaaaaaagatggacaaaggtctcaagaaccgctacacagtttgatctgagcactcctgtccagatatccaagagagtagtatatccacatgtaggatgggttttcttcgatgctttagtgtttgtcattcgcttgtagcgagcgcttgaaggctataatattgccgtgaactgtttaaacttgaaacgtaatataatgacgtatcagaggtgtctctgtactctataaatc

SEQ ID NO: 218 - DNA, 1284 bp, Saccharomyces cerevisiae
  CDS (79)..(882)
tagtttttcctattttcaaaattgagagcgcaagcaagtgagaagaaaaagcaagttaaagataaactaaagataaaaatgtcaaccagtcgtgaagattctgtgtacctagccaagttggctgaacaggccgaacgttatgaagaaatggtcgaaaacatgaagactgttgcctcctctggccaagagttgtcggtcgaagagcgtaatttgttgtctgttgcttataagaacgttattggtgctcgtcgtgcctcttggagaattgtttcttctattgagcaaaaggaggagtccaaggagaagtccgaacaccaggtcgagttgatttgttcgtaccgttcgaagattgagaccgaactaactaagatctccgacgatattttgtccgtgctagactcccacttaattccatcagccaccactggcgagtccaaggttttctactataagatgaagggtgactaccaccgttatttggctgaattttctagtggcgatgctagagaaaaggccacaaacgcctctttagaagcatacaagaccgcttctgaaattgccaccacagagttacccccaactcacccaatccgtctaggtttggctcttaacttctctgtcttctattatgaaattcaaaactctccagacaaagcctgccatttgcgcaagcaagcttttgacgacgctattgctgagttggacactctgtctgaagaatcatacaaagatagcacacttatcatgcaactgctaagggacaatttaaccttatggacttcagacatgtccgagtccggtcaagctgaagaccaacaacaacaacaacaacatcagcaacagcagccacctgctgccgccgaaggtgaagcaccaaagtaagtattctgataaatctaaagagaaattactaaaaaaaagaaaaaaaaaagaacgagggtgtaataatttgtagttcattattgcaattatatatctatatctatatatgtatataacattaacatgtgcatgtacacacgtaatcgcgcgtgtacatgtctatatgtgttacttgaactatactgttttgacgtgtatgtttatttatctctcttctgattcctccaccccttccttactcaaccgggtaaatgtcgcatcatgactcccgacaataatcccctctggtatacgcagaagcaactttagcttcttaacggcaagaacttttttatgtttgtcgcacctgtatcttcacaaaagttggatacagcaataagaaaggaaaccacatttgtgcca

SEQ ID NO: 219 - DNA, 1172 bp, Oryza sativa
  CDS (81)..(848)
agcattcgcatccacgagaccactcgaacccgacccgcctcgccgccgccgccaccgaagtaatcccttaattggtcaaaatgtctcgggaggagaatgtctacatggccaagctggccgagcaggctgaaaggtatgaggagatggttgagtacatggagaaggttgcaaagactgtagatgtggaagagctcactgttgaggagcgcaacctcttgtctgttgcttacaagaatgtgattggtgcccgccgtgcctcctggcgtattgtctcatccattgaacagaaggaggagggtcgtggcaatgaggaacatgttactctgatcaaggagtaccgtggcaagattgaagctgagctgagcaagatttgcgatggtatcctgaagttgcttgactcacaccttgtgccctcatctactgctgcagaatctaaggtgttttacctcaagatgaagggtgattaccacaggtaccttgcggaatttaagactggtgccgagagaaaggaagctgctgagagcacaatggtggcttacaaggctgctcaggatattgctctggcggatcttgctcccacccatcccataaggcttggactggcacttaacttctctgtgttctactacgagattctaaactctccagacaaggcttgcaaccttgctaagcaggcgtttgacgaagccatctccgagttggataccctcggggaggagtcttacaaggacagcactttgatcatgcagctcctgagggacaacttgaccctctggacctctgacctcacggaggacggtggtgatgaggtgaaagaagcctccaagggcgacgccggcgagggccagtaaaatgggaagatcgatcgatcgatggctccgcatgttattggagaccatcgatttagatgcctcatgctgctgtcaccatgatggatggattcttctcctgttctactagaatgtttttcttcctgtccccccttcctctctcttctctggtttttactagggtggtagcggtcgaattagttcttcccattgctttgcatttggtgctagtggtccgtctgggctgattgttttcctctggatatgactctcgtgtgtgttgtctccagatagtgttttattgagcaatatttaaagttgtcgtccacctcaaaaaaaaaa

SEQ ID NO: 220 - DNA, 1004 bp, Oryza sativa
  CDS (6)..(785)
gaaaaatgtcgcctgctgaggcatcgcgtgaggagaatgtgtacatggcaaagcttgccgagcaggctgagcgttacgaggaaatggtcgaattcatggagaaggtggcaaagaccactgatgttggtgagctcaccgttgaggagcggaacctgctttctgtggcttacaagaacgtgattggtgctcggagggcatcgtggaggatcatctcttctattgagcagaaggaggagagccgtgggaatgaggcatatgttgcatcaattaaggagtaccgtagcaggattgaaactgagctcagcaagatctgtgatggtatccttaagcttctggattcccaccttgtcccatctgccactgctgcagagtccaaggtgttctacctgaaaatgaagggtgactaccacaggtaccttgctgagtttaagtcaggagctgagaggaaggaagcagctgagaacactcttgtggcatacaagtctgcccaggatattgcactcgctgacctgcctacaactcacccgataaggcttggacttgcactgaacttctcagtgttctactatgagatactgaactcaccagaccgtgcttgcaaccttgcaaagcaggcgttcgacgatgctattgctgaactggacactcttggcgaggagtcttacaaggacagcaccttgatcatgcaacttcttcgtgacaatctgactctctggacctctgacaatgcggaggatggtggtgacgagatcaaggaagcagcgaagcctgaaggagagggccactaatctgtcctgaagtctatttctgagtccatttactcagctacctgctgtattactggatcataagatgtactaggatcaattgctatgtggaatcataagattagggctgcgtatgtcaaaatgtgtcgagctgaagtacccagtggacacagtttatgtgcactacattgcttccgtgacttatttactagttaattagcaactttcaaccaaaaa

SEQ ID NO: 221 - DNA, 964 bp, Oryza sativa
  CDS (96)..(713)
gcggcttctcccttctcttctctctctcgcatcgcctactcgttcgttttccctcgaggaggagcagaggcggcggcggcggcggcggagcggacatggctgaggtggaggcagcgccgattgcggcggcggagaccccggaggtggcggcggcggagggagcggcggcggcgaaggcgccgcacaagctgcataggcagtgggcgttctggtacgacatccagtccaagcccaagcccggcgccgcgtgggggacctcgctccgcaaggcctacaccttcgacaccgtcgaggagttctggggcttgtatgatcagattttccgtccaagcaaggtgacagtaaatgctgattttcatttattcaaggctggtgtagaaccaaagtgggaagacccagagtgtgcaaatgggggcaaatggactgtgccatgtagcaggaagaccacccttgagaacatgtggcttgaaacgctgatggctctgattggagagcagtttgatgaaagtgaggaaatttgtggagttgttgctagtgtccgccagagaggagacaagcttgcattgtggactaggactgccagcaatgaagccgttcaggtaaacattggcaagaaatggaaggagattgttgactacaatgataagatggtctacagcttccatgatgacgccaagagggagaaaccaagcagaggtggacggtacaacgtgtaagtcaccgcaaaacgttgcagcttggatagtggccatcgagtggtgtgccgataccggcgcctgttctttacagcctcagctagtgttgttgtccgaggcaatttttccgacctattgtgttgctttcctctctgatagcttatggtaaaagatacaaagatgttgaggagtttgtacgccacttaattttgctcgtaacatacattgacaatcaagaggagccatggcattgcgatctaaaaaaaaaa

SEQ ID NO: 222 - DNA, 961 bp, Oryza sativa
  CDS (46)..(726)
gctaattaaggcgcaacacagaaaccctcaccgccgcccgcatccatggcggaggagcacgagacgaggccgccgtccgccggaaggccgccgtcgtccggccgcggcagggccgacgacgctgacgagagggaggagggggagatcgccgacgacgactccggccacgcgccgccgcaggccaaccccgccgcgccgcacccgctcgagcacgcctggaccttctggttcgacaacccgcagggaaagtccaagcaggcaacctggggaagctccatccgccccatccacaccttctccaccgtcgaggacttctggagcctttataacaatatccatcacccaagcaagttggttgtgggagctgacttccattgctttaagaataaaatcgagccaaaatgggaagatcctatctgtgctaatggaggtaaatggaccttcagctgtggcagaggaaagtccgacacaatgtggttgcatactttattggcaatgattggcgaacaattcgattatggggatgaaatttgtggagcagttgttagtgtgcgtggcaagcaggaaagaatagctatctggactaaaaatgctgccaatgaagctgctcagataagcattgggaagcagtggaaagaatttctggattacaaggactcgattgggttcattgttcatgacgatgcaaaaaagatggacaaaggtctcaagaaccgctacacagtttgatctgagcactcctgtccagatatccaagagagtagtatatccacatgtaggatgggttttcttcgatgctttagtgtttgtcattcgcttgtagcgagcgcttgaaggctataatattgccgtgaactgtttaaacttgaaacgtaatataatgacgtatcagaggtgtctctgtactctataaatcagtccagttcttccttaaaaaaaaaaaaaaaaaaaaaaaaaaaaa

SEQ ID NO: 223 - DNA, 949 bp, Sorghum bicolor
  CDS (78)..(707)
cgcaaacctctctccctcgtctggtatcgtctctcccacacccaaaaaaaaccctcgaaaagcggcggcggcgcgacatggcggaggtcgaggttccagctgctgcggtcgcgacgacgatccctgaggcggcggaggctaccgagggcggagccgctgcggaggcgaagggtccgcacaagctgcacaggcagtggaccttctggtacgacatccagtcgaagcccaagcccggcgctgcgtggggcacctccctcaaaaaggcctacaccttcgacaccgtcgaggagttttggagcttgtatgatcagatttttcgtccaagcaagttgtctgggaatgctgattttcatctgttcaaggctggagtagagccaaaatgggaagacccagagtgtgcaaatggtggcaaatggactgtcccatgcaacagaaaggcaacctttgagaacatgtggcttgaaacgttgatggctcttattggggagcagtttgatgaaacagaggacatttgtggaattgttgctagtgtccgtgcaagaggagataagctcgcattatggactaggactgccagcaacgaagctgtccaggtgaacattggcaagaaatggaaggatgtcatcgactacaatgacaagatcacctacactttccatgacgactccagaagagagaagccgagcaggggcggacggtacaccgtgtaagctgcacatcaacaaggttgcttggactggatagcgggcggagtggaattttctgctgagatcagcaccaactttcatttgataagccttggcttacctgaggcaattttcgcacctattgtgatgttattttgctttcagatagcttatgtagtacaagaaagagaggttggagacattgacgattttgtatgcaactgaatttctatctgaatctgccccgattcaactgcaaaaaa

SEQ ID NO: 224 - DNA, 890 bp, Sorghum bicolor
  CDS (9)..(668)
ctgccgccatggccgacgagatcgacacgaggccggcctccgcgggctcccggggccgccccgcgcacgctacggaggacgacgacagggaggagggagagatcgccgacgacacccccgcgcccgccctccccgtcacgcacccgctcgagcactcatggaccttctggttcgacaacccgcagggcaagaacaagcaggccgcctgggggagctccatccgacccatccacaccttctccaccgtcgaggacttctggggcctttacaataatattcatcaccctagcaagttggtcattggagctgacttccattgcttcaagaacaagattgaaccaaaatgggaagaccctatttgtgctaatggcggtaaatggaccatcagctgtggaagagggaaatctgacacactgtggctgcacactctgttggctatgattggcgaacaattcgactatggtgatgaaatttgtggagcagtcgtcagcgtgcgtggcaagcaggaaagaatagctatctggacaaaaaatgctgctaatgaagctgctcagataagcatcgggaagcagtggaaggaattcctggattacaaggactccattggattcattgttcatgacgatgcaaagaaggcggacaagggaccaaggaaccgatacacggtttgatcctgttgctggaaatctcagagtgtagcatgcgcacgtgtagggtggttctatccgaatctaatgcagacatgcagtagcaccttgcagagtttagactctagtgttgaaggttctctatttgctgaggagttgcttaagcataatctaacatgttgaatgtatttcctgtatgttccataaacataatctaacactcgggtgttgtttcgtcaaaaa

SEQ ID NO: 225 - DNA, 1267 bp, Oryza sativa
  CDS (73)..(1128)
caccctcccggcggccggagcggcgcgacttcccatctaacatattgcttccggcagccgccgccggacaccatggctgactctccgagcccacgcctggacgaggaggacgccttcggccgcgacttcaactcgtccccttcgcccacagccccacccgcccgctccggcgagaagaggccgttcggcgatctggacgacgatgacgaggacgttttcgcttccaagaagggaaagacaaaggtggaagaaagtgcgccaggtgctgccacgggaatgattctgtctcttcgcgagagtttgcagaactgtaaagataatcttgcgtcatgtcaggtggaacgggaggctgccaaatcagaagttcaaaagtggcattcagcatttcagaacattccagctgtacctgctggaaccaatccagatcctgtttcggttgtttcttatctcaataacctgaagtcgtcggaagaatcattgaaggagcagctggagaaagctaagaaaagagaggcggctttcattgtaacatttgcgaaacgtgaacaagaaattgcagaactgaagtctgcagttagggatttgaaaactcaattaaggccaccatcgatgcagacaaggagattattgcttgatccagcaatccacgaggaatttacacgattaaagaatcttgtggaggagaaggagaaaaagatcaaggaactacaggacaatgttgctgctgtcaattttactccatccagtaaacatgggaaaatgctaatggccaagtgtagaacattgcaagaggaaaatgaagagattggggcgatggcttctgaaggaaaaatccatgaacttggaatgaaaattgcagttttgaagactcggaacaatgaactcaggaatcagttcaatgagctgtataaacacatggatggtctaacaaatgacgttgaaagatcaaatgaaatggtggccattcttcaagatgagttagaaacaaaagatgtagagctgagaagattgaaggagatgcttgcccagaaagaagcaactgatgagaacaaaatacctcaagaaaatgacgtcgctggagatgatatagttgctgccgccgagagtcagccaataaaagtagaaacataagctacgccttcagcagtcatttctagagtagcttgcgttctcaacattcttattattttttgtatcatgtatcagaagtgtttacttgtgtaatttatctaatgtcgtttattctaaaaaaaaaaaaaaaaaaaaa

SEQ ID NO: 226 - DNA, 885 bp, Zea mays
  CDS (172)..(669)
ggtcacacccaacctcccactgtaaaaaagagcagcggaacgtgcgtgcatccatccatccatccatttccaatcccaatcccaatcccaccagtgtccagtgctcggggaaccgacacagctcctcagcagagtagccagcacgacaagcccgatcagcagacagcaggcatggcactcgcggaggccgacgacggcgcggtggtcttcggcgaggagcaggaggcgctggtgctcaagtcgtgggccgtcatgaagaaggacgccgccaacctgggcctccgcttctttctcaaggtcttcgagatcgcgccgtcggcgaagcagatgttctcgttcctgcgcgactccgacgtgccgctggagaagaaccccaagctcaagacgcacgccatgtccgtcttcgtcatgacctgcgaggcggcggcgcagcttcgcaaggccgggaaggtcaccgtgagggagaccacgctcaagaggctgggcgccacgcacttgaggtacggcgtcgcagatggacacttcgaggtgacggggttcgcgctgcttgagacgatcaaggaggcgctccccgctgacatgtggagcctcgagatgaagaaagcctgggccgaggcctacagccagctggtggcggccatcaagcgggagatgaagcccgatgcctagtagtggcgattgcgaccagtgtttaacccatgacgcagcgccgtcacagatgtcccgtgtggtcttgcgctttagcaatttctctctggagggagcgtgtattgttatcttgtgatcgagagcctgtgtgctgcctttgcttcttgtgattatatagctactgaataaagatgtagcgttcttcaaaaaaaaaaaaaaaaaaaaaaaaaaaaaaaa

SEQ ID NO: 227 - DNA, 1723 bp, Glycine max
  CDS (301)..(1560)
gaagcttcggtttctctctctctctctttctctttctcttagggttttcactttcaccaatttctccttctcttccgatctacgcccaaaggtatcacctcgcgtgcattcgttcctaatcctttcaaactctccgttctcccatctttaacttgtttaagctgctacgtttaattgaattcgccgtttccaaattgtcttttcatttctttcttttgttctgcaattagacattgctagggttctggagtactggattagctcattaaggattgagtactccatctatcttctgtcttcatggataaagacaaatctctaggtttgccacctccgtctggacgttattctggttactcgtccaccggaagtgttttcaacgtgaaatctgaaccgtccccgtcgtcgtcaaccacgttgtatccgccattggctccgggaactaccagttccgagtctagccattttggacatggattgtccacggattctagtggttttagtcatgatattagcagaatgcctgataatcccccgagaaatagaggtcataggcgtgctcattcggagattctcactttaccggatgatattagtttcgacagtgaccttggtgttgttggaggtggtgatggtccttccttctccgatgatgccgaggaggacttgctgtccatgtaccttgatatggataagttcaattcatcgtcggcaacgtccacgtttcaaatggttgagccgtctaatgctgtgggagcatcggcttcaacaccggcgtcaggggcacccacctcttctaccgagaatgttgttattgggactaatgaaaggcccagagttagacaccagcatagtcaatccatggacggctcaaccaccatcaagcctgagatgctggtttcaggttcagaagacatgtctgcggctgattccaaaaaagcaatgtcagctgccaagcttgctgaacttgccttgattgaccccaaacgtgcaaaaaggatatgggcaaataggcagtctgctgcaaggtcaaaagagagaaagatgcgatacattgctgagcttgaaaggaaggtgcaaacattgcaaacggaagcaacatctttgtctgcacaattaactctcttgcagagagatacaaatggcttaaattctgagaacaatgaactgaagctgcggttgcaaaccatggagcaacaagttcacttgcaagatgcattaaacgatgcattaaaagaggaaattcagcatttgaaaatattgactgggcaagctatgccacctaatggaggacctatgatgaactttgcttcttttggaggggggcagcaattctatcccaataatcatgccatgcacacccttttagctgcacaacagtttcaacagcttcaaattcaccctcaaaagcagcagcagcatcagtttcagcagcttcagcaacagcagcgggaacagcaccaacaatcaattgacttgaaaatgagagaagctacacctactccatgccccaaagacaatgcctcatcagatgtaaatccttctggggccaaggactgttgagagttgagactgctcattgtcttctctatttgctttatagattttcctttgtcttgtgtcctagtgtgtttagcctttgttatattttttcattcttaaacagtacaaatggtcctagttagagattgagtataatacatttgcatctttgttattatgt

SEQ ID NO: 228 - DNA, 1048 bp, Zea mays
  CDS (101)..(1009)
cctagccgcctgaggccgacgccaaatctctcctgaccgcaacggggaactcgacccccgcctccgccaccgccaccgcgccggtcgccgacccactcagatgaacacgtctccgtccagatacagggcaatgatgggaggctgggggggttcggatgggtacgagggatcaaagaggacgcgaatgatgatggaatcgaatccctacttcgcagtgaacgcagggagcccactggatgtctcaaagagggccaggatgatggaaccaggtgctccctattttggggctatgggaagcagcgccagcggtgccggcggcggcttctaccagccctttaacagcaacctagctggtgcagggtctagcaccggtatccaaagcttcccatgtgtccggctgcgaggccttccctttgattgcaacgacattgacgtctgcaagttctttgtggggctggacatagtggactgcctcctggtcaacaagaacgggcgcttcaccggcgaggctttcgtggtcttcccaacatccatgcaggcagagtttgcgctgcatcgcgacaggcagaatatggggcggaggtatgtcgaggtgttcaggtgcaagaagcacgagtactactgcgcaatagccaatgaggtgaaccagggcggttatttcgagccggagtaccgtcgctccccgcctcctccgaggcctaggaagccgtctgaagataagggcagcatggagtacacagaggttctgaagctccgcgggcttccctactctgccaccactgaggacatcatcaagttcttcctggagtacgagctggcagaggagaacgtgcatatcgcctaccgcaccgatgggaaggccacgggtgaagccttcgttgagtttccgacagctgaagtcgcgaagacggccatgtgcaaggataagatgaccattgggacgaggtacgtggagctgttcccgtcgaccccagaggaggccagcagggcgaaatcccgaggcaggcattgaagaaacgtgttccagtgatcttctgtatgcatgcat

SEQ ID NO: 229 - DNA, 1797 bp, Zea mays
  CDS (528)..(1544)
gccggcgagccccgctccgagcatctccgctgctgcttctgccgaatcccagagctccttctcccgcttgccccctttccctcctgtcacattgattcgattttcgtcgcccatggagctacaaattaagtgtaggaaccaattaaaagcttgccaaaactagggcggcggcatcagcattcagcaataccctaggcgggctctcctcgcctccacagctccaggaagccgacccagagcagcacagcgccgcccattctgtctctctcggtctcggcagcgtaggcagcgtcaccctccgcttaaaccaccagcaccagctgctggtgcgccgccccgcccggcaccgccgctcctctacctcttcctggtggattggtgagaggaagccctaacttggcctctcttgaatcaactcggcggtggctttgagtcagtaggtgttgttttgcgctcttattcaaaacccaaatctgtccctcctctcagattattgtgagtttatccctgccccaatccatctgtccatggtccgcgtgggcttgtcttccgcgcccggggtcaatctgacagagcaaatcgataatgtttttgaccaactgatcaacaagatagaacatgcggattttgatacgcggcctttcttgaaacaattgaatgtgttaggccgctatgaaccaatcaagcggaatgtatattgcactaagagacgcattgaagattatggcatttcttgtcactgtaagccttctcctggttcatcagttgtgtgtggcagagactgccattgtggcatgcttttctcttgctgttcatcacaatgtgaatgtgatgacacatgcaccaataaatcattccagcacagacctcttaagaaaaccaaattgattaagacagagaaatgtggtcatggattggttgctgaggatgaaataaagaaaggagaatttgttattgagtatgttggagaagttattgatgacagaacatgtgagaataggctatggacaatgaaaaggctgcttgacactgacttctacctttgtgaggtcagtagtaatatggtcattgatgcaacaaacaagggaaaccggtcccgattcataaaccatagctgtgaaccaaacacagcgatgcagaaatggactgttgatggagagaccagggttggaatttttgcacttcgtgacataaagataggggaggagctgacctatgactataaatttgtccagtttggagcagctcaagtttgtcattgtgggtcttcgaactgcagaaaaatgctaggcacgacgaagtattcaggaagctcacagaatcatcatgccaagaagaaaaagcggaaaacaagttgtgagaattgcatacagcagtttcttcggctgtggcatccacataaaaaaatgtatgttggttgttggataattgacttcgatcaagaaactaaaatgcatactctgaagttcaatgatctccatactgaaaagttcaatttgaaggaagaagaatggcacttcttagaggtcgattttgatgaagattgatcattgaaggtaactgcaagagttggctgccatggtttgtgacagggttgccatggtttgctgcaccgccggcctactagttgggggttcatttgcgatggcagcatagacagacggacggccatttttcttccattttggagtaatagtccaagcctgaactgtgacattcgtgcatgcttatacgtgaaagtgtacctgagagcagattatacgtgaaagtgtatcagcgttgcataaaaaaaaaaaa

SEQ ID NO: 230 - DNA, 1383 bp, Zea mays
  CDS (71)..(814)
gcctgaagaacttttgccacatggcagttctttgccttgggaaggatttcactatatcacaaaccgtgtgatggattcatctcttattgattcagagaactctatgcctgggtgtgcatgttctcatcctgaatgttctcctgagaactgtggtcacgtgagtctctttgatggtgtctacaatagcctggtggatatcaatggaacaccaatgcatggcagatttgcatatgatgaagatagtaaaattattttacaggaagggtatccaatatatgagtgcaattcatcatgtatttgtgactcgtcctgccagaataaagtattgcagaaagggctgcttgttaggttggaactctttagaagtgagaataagggttgggctattagggctgctgaacctattctacagggtacctttgtctgcgagtatattggtgaagttgtgaaggctgacaaggctatgaaaaatgcagaaagtgtgtcatcaaagggtgggtgcagttacttgtttagcattgcttcccagattgatagggaaagagttcggactgtaggggctattgaatactttattgatgccacaaggtctggaaatgtttcccgttatattagtcacagttgttccccgaatctcagtacccggttggttttggtagagagcaaagattgccagcttgctcacattggattgtttgctaatcaagatattgccgtaggagaagaactcgcctatgattaccgacaaaagcttgtagcaggcgatggctgcccatgccattgtggaactaccaattgccgaggccgtgtctattgattttgcaggaatacactaactgttcaatgctcggttgcagaactccagagatttcaacagttgtgtaggcttgctgagcgatttagcattgcaattttcctacagcttgagtgcagggctaggatctcattgttaatgctacaaatagtgattgtgatataggactcaggcaagcattaggcaataacatagtgtcgattttagtcatggtaccatcatgtttaactgattatttgttagaagcagcctgaaatgaaactgattcaggctgctctgttcgtaggcgagaattctctctgtaaaattccttcatattttatggttcatgagcaccatcattgacgtgaagtaataaactagttatcccagtggcctattgtgcggataatactccctctgttttttttagggagcgacaaataaaaaaaaaaaaaaaaaaaaaaaaaaaaaaaaaaaaaaaaaaaaaaaaaaaaaaaaaaaaaaaaaaaaaaaaaaaaaaaaaaaaaaaaaaaaaaaaaaaaaaaaaaaaaaaaaaaaaaaaaaaaaaaaaaaaaaaaaaaaaaaaa

SEQ ID NO: 231 - DNA, 3061 bp, Zea mays
  CDS (34)..(2706)
ggggccgtcgcagaattcgcgccaccgcccgcgatggcttcgtcctcgaaggcctccgattcctcccaacgatccaagcggtcggatcaggggatgggcaaggacgccgctgccgcctctgttgtcccgatccacgcgaacctgacgcagctgatacggcaagtccaatcggggcgcctcgcgtacatcaaggagaaattggaggtgaacaggaaaacgctgcagaggcactcctgctcgctgttcgacgtggcagcggcggcggaggtggcgtcgaggggcaccgatggcggcaacgcgctgtcacagcgcgcggcggagagacagtgtgggtcagacctggcaaacgggataggggagagggacgtggtttccgttcaggaggagaacctggctaccggtacgctcgcgctctccagctcgggcgctaccgcgcagcggacaattgtgcggttcgtgaagctgccgctggttgagaagatccctccgtacaccacttggatcttcctggacaaaaaccaaagaatggctgacgatcagtcagttgttggtaggagaaggatatactatgatacagttggaaacgaggctctgatctgcagtgacagtgatgaagaaattccagaaccagaggaagagaaacactttttcacaaagggagaagatcatttgatatggagagctactcaagaccatgggttaaaccaagaggttgttaatgtcctttgccagtttattggtgcaaccccatcagaaattgaggaaagatctgaagtcctatttgagaaaaatgagaagcactcaggatcttcagataagatagagagccgactttctcttgacaaaactatggatgccgttctggattcttttgataatctcttctgccgcagatgcttggtttttgattgccgccttcatggttgttcacagaatttggtatttccatgtgagaagcaaccctacagctttgaccctgatgaaaacaagaagccatgtggtcatttgtgctaccttcgatggagagaaggatttaaagagatgcatgatgatggtcttgctggtggtgcaacatatactatggaatcgggaactgcctcacagagagttgatgttaatgttatgtatgaatcagaagattcaaaccgacagaaaggcaacattaggtccatgacactagttggaaccagtggatcaaaaataatttcttctgtcagtgcggaagaaagcactactactccttcagcagatatctctgaaacagagaatgtatcctctgatttgcctcccagtagtttaaggaaacacaagatttcaaaacatggacctaggtacagggagcattctcctggcaaaaggcagaaggttttcacttctgacatttcttttgaaggcaatataatgaataaactttccattccggagattcgtgacacaagactagagtccagagaatctggtggtgataaactacgaattcttgacgagtccactaagaagacttcaaggaaagatatgtgtggggaaagcccagctactaccatggaaaatgtgggaagacagagtaataaagtgtcttcaacaaagaatttcttggagtccactctttcttgttggagtgccttagagcgagatctatacttgaagggcatagagatatttggaaagaacagctgtctcatcgccagaaacttactatctggtcttaagacctgcatagaagtggcaaactacatgtataacaatggtccagcgatggcgaagagacctctcttgaataaatccatctcaggcgactttgcagaaaatgaacaagactacatggagcaagacatggctgccagaacaagaatctatcgtcggaggggccgcaatcgaaagctgaaatatacttggaaatctgcagggcatccaactgttagaaaaagaactgatgacgggaagcaatgttacacacaatatagcccatgtgcgtgccagcaaatgtgtggtaaagattgcccctgtgcggacaagggaacttgctgtgagaagtactgtgggtgttcgaagagctgcaaaaacaagtttagaggctgtcattgtgcaaaaagccaatgcagaagcagacagtgcccctgttttgcagccagtcgtgaatgtgatccagatgtttgtaggaattgctgggtgagctgtggagatggttcactaggtgagccacttgcaagaggtgatggttatcagtgtggaaatatgaagctccttttgaaacaacagcaaaggattttgttaggaagatctgatgttgcaggttggggtgcattcattaagaatcctgtaaataaaaatgattatcttggagaatatactggtgaattgatctctcacaaggaagcagacaaacgcggcaaaatttatgaccgggcaaactcatcttttctgttcgatttaaatgaccagtatgtgttggatgcttatcgcaagggggacaaattgaagttcgcaaatcactcatctaaccccaactgctatgcaaaggtgatgctggtggctggcgaccatcgggttggtatatatgcgaaggagcatattgaggctagcgaggaactcttttatgattatcgttatggacctgaccaggctccagcttgggctaggagacccgaaggatcaaagaaggacgaggcatccgtctctcaccgtcgagcacacaaagtggctcgatagctgaagagtcgctccggatgatacaatatgcagtaaacttaatacttaatacatgattcagtcctagttcattggtagataaacatgctatatactatccattagtaaataaactctcattcatcgagttggagaataaatgcgtataaacatatgtggacctcaggtcgggaaggtggcaaccttgttagtttgagcaccaacaggttctcaaacttgagtggctattgctagagtatcaaataatggctgcgactatagccttgtttgtatattttcttggtgagatgaaataatttgtcaaacactcaaatgtacactttattcctgaaagtatttgatgattcaaaaa

SEQ ID NO: 232 - DNA, 3480 bp, Zea mays
  CDS (478)..(3045)
gcctgatctgcgcgtccctgtcctcggctcctgagcactcgcgtactcgctcgtcgcatctgcccacactaccactggccacaccgaaaccctagctgcgcacccaaatcgatcgatccagggacggcagcggcacgacgcgccaaaataggttcagaactagcgtcgcgacaaaatcggttcacgaccgccacggttggaccagctgcgccgtggccgtgcggctgtgcggccggcattggcgcgctgcgcgctgcttcaggccggtgtgccgcgcggctgggcgacgtgaaacggattcacatcgtaggagcagaacttgctggtcgaggtggaggcttgctgcgtgcagcaggacagggagtcagggacaacagattttagcaaagtatgagctgtgaactagtgttagaggaaagcacgaaggaaatagtggcataaaacttgatttgtctaaagataaattggtttcttaaaatggctcagcaaatggcttcagttcatttgaatgatacaacagttgttgatgccaagcccttgcgtacattgactcccatgttccctgcaccactagggcttcacacgttcactcctcagaactcaccttcagttgtttgtgtgaccccatttggaccatatggtggagggactgaattggggatgcctgctgttccaccaatgtttgcagcgcctgtacctgctgcaggagcagaacccagccagagacagccgcatacagctaatatgaacggaggagacactgaattggggatgcctgctgttccaccaatgtttgcagcgcctgcacctgctgcaggagcagaacccaaccagggacagccacatacagctaatatgaacggaactgcagtcaacagttcggtcacatctttgcaaactccttcagctgccacacaggaatctggtaagaggaagaggggcaggccaaagcgtgtgcctgatactactgtttcttcggctccttcagctcctctggctcctactatttctccagttccttcacttcctgtggttactccagttccttcagctcctcaggaattgaacactattgtttccctgacgccttcttcagacgccccacaagaatctggcaagaggaagaggggacggcccaaacgtatacaagacgttcctgtaatggttcctctgacctcgcaaggagatagcacatctgttattcagacacttccagggtccagtgtacatgaatctggtacgagaaggggacgtcccaaacgtttgcaggatagttcagatattgtcactccaattgactcaaaagatagtgagtcctctccccagccacctattgccgcacctgccgaaagtggtaagaggaagaggggacgtccaaagcgcattgatggttccgtgactccttcaagtcattctgttttttcaatagatgatgatgctgttgacacgatgaaacgtggacgacctaggaaaattgataccaaactgttacagtttccatctttattttcagatgatcctagacaaactgcagataatgtactcatgatgtttgacgccctgcgacgcagacttatgcagatggatgatgtgaaacaagctgcaaagcagcagcctaacttgaaagctgggagcatcatgaacaatgctgaacttcgtgtcaataaggacaagaggataggagaggttccaggtgttgaggttggtgatatgttctacttcagaattgagatgtgcttagtggggttgaatagtcagagcatggcagggatagattacatgtctgccaagttcggtaatgaggaggaccctgtagctattagtgttgtgtcagctggtgtatatgataacactggagatgatccagatgttctagtttatactggacatggcatgtcgggtaaggatgaccaaaaacttgagaggggtaatcttgcactagagaggagtttgcatagaggtaatccaatcagagtcattcgtagcgtaaaagacttgacttgtccaactggcaagatttacatatatgatggtctttacaagatcaaagaagcctgggtagagaaagggaaatctggtttcaatgtgtttaaacacaagttgcttagggaacctggccaacctgatggcattgcagtgtggaagaagactgaaaaatggagggaaaatccatcatctagagaccatgttatattacttgacatatcatatggtgtggaaaataaccctgtctgccttgtaaatgaggttgacgatgaaaagggccctagccgcttcacttatacaactaatttgacatatgggaattctctcagctcgatgagaaagatgcaaggttgcaaatgcataagtgtatgcctccctggtgataacaactgctcctgtacgcatcgaaatgctggtgaccttccttacagtgcttcaggcatacttgttagccgaatgcccgttttatacgagtgtggtgattcctgcacatgttcacaaaattgccggaaccgagttgtacagaaaggtacgcagatccgttttgaagtttttaagacaggagatcgtggttggggcctccgtagttgggatccaattcgagcaggcacatttatctgtgaatatgcaggtgaaatcattgacataaatagagtgaatggtgaagatgactacatatttgagacttctcctttagagcagaatttaagatggaactatgcaccggaattgctgggtgagcctagtctttctgactcaaatgaaacaccaaagcagctgcctatagtcatcagtgcaaaacgaaccggcaacatagctcgctttatgaaccacagctgctcacctaatgtgttttggcaaccagttctgtatgatcatggtgatgagggatatccacatattgcattctttgcaattaagcatattcctccaatgacagagcttacctatgattatggtcagaaccagcgtaatagtattcaaatgggaacccattctggttttcggaagtctaaaagttgcttatgttggtccccgaagtgtagaggttcctttggctaataaccagccctataaggaatatattggatcataatactccatttcaaagttacacctaagatatctgctggtcgacttttatattcagctcccaaaaatctgtcacaagtttgtgagagcaactgaattgtctttaccagcagaagcagcccgccatggtggcctgtatgaagcagcaggggtctcctatgtcctaggtgttccatgcaccatcgaataaatccacccctcttcatgttagaatgggaaacggggatgtgttttgcacaaattatctgtcatgcagtcgtcgtattaagttttcttgaactagtttgtagtcatcctcagagaatgcatgatgtgcactttgtagtaatatatgcaggttgttatcccacctaaaaaaaaaaaaaaaaaaaaaaaaaaaaaaaaaaaaaaaaaaaaaaaaaa

SEQ ID NO: 233 - DNA, 2985 bp, Zea mays
  CDS (37)..(2634)
gcggccgctgcccgggttttcgtcggtcccttcgccatgtcttcgctggacccttcgccagcgacgagcacccaacagaagcaattggagagtttggtaaatctactgacgcagggaagcaggttctaccgcaaagcatataatgaactgttctcaggtgtaactactgagcaggatccggattcatcgactaatattcctgagtatatgctttttgggtggcatctcttcttaatgctccattcgagatcaccagaattgttcaaggacctggtgtcctgcatccatggattagttgctgtgttggccatacttttgattcacgtgccagctaaatttaggagcttcacgattgaaggctcttctcacttaatcaaacaaactgagaaaggcgtggatcttattgcttcattatgtcataactatcatacctctgaagaacgtttgaaagaaatgttgcacaagtcttacaatgcaatagaagacattttccatatgaaagcactaagtgcttcagagtgcaaaccagaaaatttggataagatagacacagatgacctgatgtatttcaaaggtctgattgatatggaatgtttccagtcaaatttggaaaaaatggagaaactatgtaattctaatagctgtaaaggggagcttgattttaaatcaattttgatcaataatgattatattccctatgatgagaactcgacgggggattccaccaatttaggacgttcaaagtgtgcctttgaaacattggcatctcccacaaagacaataaagaacatgctgactgttcctagttcccctttgtcaccagccaccggtggttcagtcaagattgtgcaaatgacaccagtaacttctgccatgacgacagctaagtggcttcgtgaggtgatatcttcattgccagataagccttcatctaagcttcagcagtttctgtcatcatgcgatagggatttgacaaatgctgtcacagaaagggtcagcatagttttggaagcaatttttccaaccaaatcttctgccaatcggggtgtatcattaggcctcaattgtgcaaatgcctttgacattccgtgggcagaagccagaaaagtggaggcttccaagttgtactatagggtattagaggcaatctgcagagcggagttacaaaacagcaatgtaaataatctaactccattgctgtcaaatgagcgtttccaccgatgtttgattgcatgttcagcggacctagtattggcgacacataagacagtcatcatgatgtttcctgctgttcttgagagtaccggtctaactgcatttgatttgagcaaaataattgagaactttgtgagacatgaagagaccctcccaagagaattgaaaaggcacctaaattccttagaagaacagcttttggaaagcatggcatgggagaaaggttcatcattgtataactcactgattgttgccaggccatctgttgcttcagaaataaaccgccttggtcttttggctgaaccaatgccatctcttgatgacttagtgtcaaggcagaatgttcgtatcgagggcttgcctgctacaccatctaaaaaacgtgcttctggtccagatgacaacgctgatcctcgatcaccaaagagatcgtgcaatgaatctaggaacacagtagtagagcgcaatttgcagacacctccacccaagcaaagccacatggtgtcaactagtttgaaagcaaaatgccatccactccagtccacatttgcaagtccaactgtctgtaatcctgttggtgggaatgaaaaatgtgctgacgtgacaattcatatattcttttccaagattctgaagttggctgctattagaataagaaacttgtgcgaaagggttcaatgtgtggaacagacagagcgtgtctataatgtcttcaagcagattcttgagcaacagacaacattattttttaatagacacatcgatcaacttatcctttgctgtctttatggtgttgcaaaggtttgtcaattagaactcacattcagggagatactcaacaattacaaaagagaagcacaatgcaagccagaagttttttcaagtatctatattgggagtacgaaccgtaatggggtattagtatcgcgccatgttggtatcattactttttacaatgaggtatttgttccagcagcgaagcctttcctggtgtcactaatatcatctggtactcatccagaagacaagaagaatgctagtggccaaattcttggatcacccaagccatctcctttcccaaatttaccagatatgtccccgaagaaagtttcagcatctcataatgtatatgtgtctcctttgcggcaaaccaagttggatctactgctgtcaccaagttccaggagtttttatgcatgcattggtgaaggcacccatgcttatcagagcccatctaaggatttggctgctataaatagccgcctaaattataatggcaggaaagtaaacagtcgattaaatttcgacatggtgagtgactcagtggtagccggcagtctgggccagataaatggtggttctacctcggatcctgcagctgcatttagccccctttcaaagaagagagagacagatacttgatcaattataaatggtggcctctctcgtatatagctcacagatccgtgctccgtagcagtctattcttctgaataagtgggttaactggagcgatttaactgtacatgtatgtgttagtgagaagcagcagtttttaggcagcaaactgtttcaagttagcttttgagctatcaccatttctctgctgattgaacatatccgctgtgtagagtgctaatgaatctttagttttcattgggctgaaaaaaaaaaaaaaaaagggcggccggcgatcccacgcgtccgcccacgcgtccgcccacgcgtccgcccacgcgtccgcggacgcgtgggtcgacccgggaattc

SEQ ID NO: 234 - DNA, 889 bp, Wheat dwarf virus
  CDS (49)..(843)
cacaccccgttttttcgctaaggacctgccggacttctgttcactaccatggcctcttcatctgcacccaggttccgtgtctattccaagtacctctttctaacatatcctgaatgtacccttgagccacagtacgccttggattcacttcgcactctcttgaacaaatatgagcccctctacatcgctgctgttagagagctccacgaagatggatcaccacatctgcacgttctcgtgcagaacaagcttcgtgcttccatcaccaatcccaatgccttaaacctccgtatggatacatctccattctccatattccatccaaatatacaagctgccaaagactgcaaccaagttcgtgattacatcacgaaggaggttgactccgatgtaaacacagctgagtggggaacattcgtggctgtttcaactccaggtcgtaaagaccgtgatgcggatatgaaacagatcattgaatctagttcctctcgcgaggaattcctcagcatggtttgcaatcgttttccgtttgaatggtctatccgtctcaaagacttcgagtacacggcacgccatctatttcctgacccagttgccacttacacacctgagtttccaaccgaatcactcatttgccatgagaccattgaaagctggaaaaatgaacatctctactccgtaagcctcgaatcctatatcctttgtacttccactcctgcggatcaagcgcaatctgacttagagtggatggacgattattccaggagtcaccggggaggcataagtccatctacatctgcgggccaaccagaacaggaaagacttcctgggcaaggtctctagggacacacaattattataacagtctagttgatttcacaacatatga

SEQ ID NO: 235 - DNA, 1315 bp, Arabidopsis thaliana
  CDS (81)..(1136)
ctctcacccaattttgtgtttcttctttctgctaaaaggttataatttttgtttcttggtttggtgagaatcttcaagaaactgaaacaaagaaaatggattctagttgcatagacgagataagttcctccacttcagaatctttctccgccaccaccgccaagaagctctctcctcctcccgcggcggcgttacgcctctaccggatgggaagcggcgggagcagcgtcgtgttggatcccgagaacggcctagagacggagtcacgaaagctaccatcttcaaaatacaaaggtgttgttcctcagcctaacggaagatggggagctcagatctacgagaagcaccaacgagtatggctcgggactttcaacgagcaagaagaagctgctcgttcctacgacatcgcagcttgtagattccgtggccgcgacgccgtcgtcaacttcaagaacgttctggaagacggcgatttagcttttcttgaagctcactcaaaggccgagatcgtcgacatgttgagaaaacacacttacgccgacgagcttgaacagaacaataaacggcagttgtttctctccgtcgacgctaacggaaaacgtaacggatcgagtactactcaaaacgacaaagttttaaagacgcgtgaagttcttttcgagaaggctgttacacctagcgacgttgggaagctaaaccgtctcgtgatacctaaacaacacgccgagaaacactttccgttaccgtcaccatcaccggcagtgactaaaggagttttgatcaacttcgaagacgttaacggtaaagtgtggaggttccgttactcatactggaacagtagtcaaagttacgtgttgaccaagggatggagtcgattcgtcaaggagaagaatcttcgagccggtgatgttgttactttcgagagatcgaccggactagagcggcagttatatattgattggaaagttcggtctggtccgagagaaaacccggttcaggtggtggttcggcttttcggagttgatatctttaatgtgaccaccgtgaagccaaacgacgtcgtggccgtttgcggtggaaagagatctcgagatgttgatgatatgtttgcgttacggtgttccaagaagcaggcgataatcaatgctttgtgacatatttccttttccgattttatgctttcgttttttaatttttttttttgtcaagttgtgtaggttgtgattcatgctaggttgtatttaggaaaagagataagaccaaaaaataaattggaacaatggttttgtggaaaagtggtaaatagacctacctc

SEQ ID NO: 236 - DNA, 1644 bp, Oryza sativa
  CDS (336)..(1430)
gtaattaactaggctcaagatagatagacgtcgtctctactactcctactagaaaacatatctttgtccaagcaaattaacaaaatcaaatatagcaagaacacgtttaattttgtacacatgctgcgtttgggttggtccaaataaaatacaaagaccagtgtctatatatacagagcacacgcccacagcaactatcactcttcatcatcatcttctttggcttctccctcttcactgccctaattacaacccatttgcttatctctctcctctctctctctctctcgctgcagccatagcttagctagagctagagctttcttggtgccgagatgggggtggtcagcttctcctcgacttcctccggcgcgtccacggccaccaccgagtccggcggcgccgtgcggatgtcgccggagccggtggtggcggtggcggcggcggctcaacagctaccggtggtgaagggagttgactcggcggatgaggtggtgacgtcgaggccggcggcggcggcggcgcagcagtcgtcgcggtacaagggggtggtgccgcagccgaacgggaggtggggggcgcagatctacgagcggcacgcgcgggtgtggctcgggacgttccccgacgaggaggcggcggcgcgggcctacgacgtggcggcgctccggtaccgggggcgcgacgcggccaccaacttccccggggccgcggcgtcggccgccgagctcgcgttcctcgccgcgcactccaaggccgagatcgtcgacatgctccggaagcacacctacgccgacgagctccgccaggggctccgccgcggccgcggcatgggcgcccgcgcccagcccacgccgtcgtgggcgcgcgagccgctgttcgagaaggccgtgacgcccagcgacgtcggcaagctcaaccgcctcgtggtgcccaagcagcacgccgagaagcacttcccgctccgccgcgcggcgagctccgactccgcctccgccgccgccaccggcaagggcgtgctcctcaacttcgaggacggcgaggggaaggtgtggcgattccggtactcgtactggaacagcagccagagctacgtgctgaccaaggggtggagccgattcgtgagggagaagggcctccgcgccggcgacaccatagtcttctcccgctcggcgtacggccccgacaagctgctcttcatcgactgcaagaagaacaacgcggcggcggcgaccaccacctgcgccggcgacgagaggccaaccacaagcggcgccgaaccacgcgtcgtgaggctcttcggcgtcgacatcgccggcggcgattgccggaagcgggagagggcggtggagatggggcaagaggtcttcctactgaagaggcaatgcgtggttcatcagcgtactcctgccctaggtgccctgctgttatagcatcaaatcaaattcatatatagatcaaatcaaatcttcttctcttccatcttttttgttgttcatcgtctgttgtttcatcttcgatttagagctgttctatcttcgactttctttttttgttttttgtctttattttgcatagaagtttgtcaggtcagagattgcaaatgatcgatcaagatcgagctgtatatgtacagccttatta

SEQ ID NO: 237 - DNA, 2001 bp, Oryza sativa
  CDS (572)..(1522)
aaagcgacaattaaattgtttcaccaaaaaaaaccaattaaaattatcagtaaaaatactaaaatagctaagaatatatgtatgctcatggaccatttctgtggaaaaagcatgctggcttgcacgaatcaaatttaattaaatatggtacacatcaaaactaaataatagcatcgaccaaaatagtcgattactaacagagattctcgtagccacacatgcctaaacagtaggcacaaacgaacacttgcctgaaaagatcacgcaaaaaatatagcataaaatgacagtctcaacagtgtaaagtttgcaagaatgtgcaattagaagctaacataaacacaaaactagctatcatacatacgagtgaagggctggaagcagctaagctgaaagctcaacacaacatatactaccaatctagctacaaggccactccaagtcgcatatatactagtatctataagctaggctgttctctctttccattcgtcaagaactaccacgacgtcgacatcataatcgtcagagagctcgagaaattttttagtatctttgatccagatcgatcatggagcaagaagctgccatggtcgtcttctcctgcaactccggctccggtgggtcgtcgtcgacgaccgattcaaagcaagaggaggaggaggaggaggagttggccgcaatggaggaagacgagttgatccacgtcgtccaggcggcggagctgcggctgccgtcgtcgacgacggcgacgcggccgtcgtcgcggtacaagggggtggtgccgcagccgaacgggcggtggggggcgcagatctacgagcggcacgcgcgggtgtggctcgggacgttccccgacgaggaggcggcggcgcgcgcctacgacgtggcggcgctccgcttccgggggcgcgacgccgtcaccaaccgcgccccggcggcggagggcgcgtccgccggcgagctcgcgttcctggccgcgcactccaaggcggaggtcgtggacatgctgcggaagcacacctacgacgacgagctccagcagggcctccgccgcggctcgcgcgcgcagccgacgccgcggtgggcgcgcgagccgctgttcgagaaggccgtgacgccgagcgacgtcggcaagctcaaccgcctcgtggtgcccaagcagcaggccgagaggcatttcccgttcccgctccgccgccacagctccgacgccgccggcaagggcgtgctcctcaacttcgaggacggcgacggcaaggtgtggcgattccggtactcgtactggaacagcagccagagttacgtgctcaccaaggggtggagccgattcgtgagggagaagggcctccgaccaggcgacaccgtggccttctcccggtcggcggcggcgtgggggacggagaagcacctcctcatcgactgcaagaagatggagaggaacaacctggcaaccgtcgacgacgatgcccgtgtcgtcgtcaagctgttcggcgttgacatcgtcggagacaagacgaggtaacacgcaagcgcagctagctgcatcgtatcgatcatatatatcaccccggcgccttcttcttcttcttcttcttcttcttcttcttcttcttcttcttcttcttcttcttcttcttcttcttcttcacttgttcttcgttttcttcctcttcgatcttctcattcatcttctgttgctgccctagctacaatgatcgatcgatggatgatccatatcatcgttgatccttcgcttcacatcaggttcatcattcctagctacatcgatatatgtacctataatttgatgatgagatgaacttcttcaaaattcaaattaatctctgaagaaaccaacggagaattaggatcagagtgtgctagctacatgtgagctagagattagagaaatttaagagtgtgtgttatatgtaaatatatcgatcattgccagatcgatcgaggcgaaactatagaattttgccttggggtttaatt

SEQ ID NO: 238 - DNA, 1008 bp, Zea mays
  CDS (1)..(747)
atggtgaagctcgcattcggaagcgtcggcgactccttcagcgtcacctccatcaaggcctacgtggccgagttcatcgccaccctcctcttcgtcttcgccggcgtcggttccgccatcgcctacgggcaactgacgaatggcggcgcgctggacccggcgggcctggtggcgatcgcgatcgcgcacgcgctggcgctgttcgtgggcgtgtccgtcgcggcgaacatctcgggcggccacctgaacccggccgtgacgttcgggctggccgtgggcggccacatcaccatcctgacgggcgtcttctactgggtggcccagctgctgggcgccaccgtggcgtgcctgctcctcgggttcgtcacccacggcaaggccatcccgacgcacgccgtcgcgggcatcagcgagctggaaggcgtcgtgttcgaggtcgtcatcaccttcgcgctcgtctacaccgtgtacgccaccgccgccgaccccaagaagggctcgctcggcaccatcgcgcccatcgccatcggcttcatcgtcggcgccaacatcctcgccgcggggcccttcagcggcggctccatgaaccccgcccgctccttcggccccgccgtcgccgcgggcgacttcgccggaaactgggtctactgggtcggcccgctcgtcggcggcggcctcgctggcctcgtctacggcgacgtcttcattggcggctcctaccagcaggtcgcggaccaggactacgcctaatttattcaccactccatctccgctctggatgaatggattcaaaaccgtcgtcgtttgcttttgctcctcgccacgttcaattaatggttgtgtatgcatgtatgtgccaatatgatgtgcctttgccctggtccattcatttccctttcttttttcggggtgaaatagatgtaaagatctcgtcttgcctgccgtactcgcgctgtgttgggaaaaattggttttcgttccaaaaaaaaaaaaaaaaaactcgagggg

SEQ ID NO: 239 - DNA, 1157 bp, Zea mays
  CDS (1)..(864)
atggcgaagcaggacatcgaagcatcggggcccgaggccggcgagttctcggccaaggactacacggaccctccgccggcgccgctcatcgacgcggatgagctcaccaagtggtccctctaccgcgcggtcatcgccgagttcatcgccacgctgctcttcctctacatcaccgtggccaccgtcatcgggtacaagcaccagacggacgcggcggcgtcgggccccgacgcggcgtgcggcggcgtgggcatcctcggcatcgcgtgggccttcggcggcatgatcttcatcctcgtttactgcaccgccggcatctacggggcacataacccggccgtgaccttcggcctgttcctggcgaggaaggtgtccctcgtccgcgccctgctctacatcatcgcgcagtgcctgggcgccatctgcggcgtcggcctcgtcaatgggcttcagagcgcctactacgtgcgctacggcggcggcgccaacgagctcagcgacggctactccaagggcaccggcctcgccgccgagatcatcggcaccttcgtgctcgtctacaccgtcttctccgccaccgaccccaagcgcagtgcccgtgactcccacgtcccggtgttggcccctcttccgattgggttcgccgtgttcatggtgcacctggccaccatccccatcaccggcaccggcatcaacccggcgaggagcttgggagccgcggtcatctacaacaaggacaaggcctgggacgaccaatggatcttctgggtgggcccactgatcggcgccgccatcgccgccgcctaccaccagtacgtgctgagagccagcgccaccaagctcgggtcctaccggagcaacgcctaataagtccggcggcgggagctgtgggcgccaccgatcgatccaagtgtagatacgtacgctcccccgactccgtccagtatatgacgccctgtggtcgtccacatctgccaccacagtcccgtccgcttggtgctgttttctttctttccttgacggggaaaaaaagtgtgatatatctttgctttctgtatatgtgacaaaatgcattctgtaagccagtcatgtgagtttttatttaaccacagtctacttttagaacgatttaaaaaaaaaaaaaaaaaactcgaggg

SEQ ID NO: 240 - DNA, 1135 bp, Zea mays
  CDS (177)..(860)
cacgacttcctcccgccgccggttggcttcgctgctcgtccacctccgcccggcccgtgggacgagtggggactggagagggtcgcctctgggcttcgcctctcggcggccgagtgtctgcgtcgtccacggagctgagagcctgagactgagactgagagcgaccggcggcggggatggcgagggagaggcgggagataaagaggatagagagcgcggcagcgaggcaggtcacgttctccaagcgccgccgcggcctcttcaagaaggcccaggagctctccgtgctgtgcgatgccgacgtcgcgctcatagtcttctcctccacggggaagctctcccagttcgccagctccagtatgaatgagataattgacaagtacaacacgcattctaaaaacctggggaaaacagaacagccttcgctggacttgaacttagagcatagcaaatatgcaaatttgaatgagcaacttgcggaagcaagccttcgactcaggcagatgagaggtgaagagcttgagggattgaatgttgaagaactccagcaattggagaagaacctggaatctggtctgcatagggtgcttcaaacaaaggatcaacaattcttggaacagatcaatgacctcgaacgtaagagtacgcagctggcagaggagaacatgcaactgaggaatcaagtatcccagatacccccagctggcaagcaagcagttgctgatactgaaaatgttattgctgaagaagggcaatcctctgaatcagtgatgactgcgttgcactctgggagttcacaggataatgatgatggttcggatgtatctctaaagttagggctgccttgcgttgcatggaagtaaacaggaaatgaggctccttgtcgattctgggtgtggatgtgggtggagctgcggcctcagcggataggcacttgtgtatggttttatggacgaccggcccccgactacgtactgcaataatcttgcattggaagcgagatcggttaacctgatttgtcatcccttgtggcttcatgatgcgatgttccgcttgtaccgtttgctagcatgttaactgaatttttagaatcgcatatacttttgttcctatatatcactgtcgtactgctcgt

SEQ ID NO: 241 - DNA, 1021 bp, Zea mays
  CDS (93)..(791)
cctccggactgctccggacgcgcgcctcagatctactccaacacctccgcagcggcggcgcccgcgggtggaggagcaggagaggcggcgccatggtcgggaccgggaagagggagcggatagcgatacggaggatcgacaacctggcggccaggcaggtgaccttctccaagaggcggcggggcctgttcaagaaggccgaggagctctccatcctctgcgacgccgaggtcggccttgtcgtcttctccgccaccggcaaactcttccacttcgccagctccagcatgaagcaggtaatcgatcggtacgactctcattccaagactctccagaggtccgaaccgcagtcgtctcaactgcagtcacatatggatgacggcacttgtgcaaggctaaaggaggaacttgctgaaacaagccttaagctcaggcagatgagaggagaggagctccagaggctgagcgtcgaacagctgcaggagctcgagaagaccctcgaatccggcctcggctctgtactcaaaaccaagagccaaaaaatccttgacgagatcagcggtctggaaagaaagagaacgcagctgatcgaggagaactcaaggctgaaggagcaagtgacacggatgtcgaggatggagacgcagcttggcgccgatccagagttcgtgtacgaggaagggcagtcgtctgaatccgtgacgaacacgtcctatccgcgcccgtccaccgacaccgacgactgctccgacacatcgctcaggctcgggctaccactcttcagctccaagtgacggagatttgacatgtccggtagcggagcggtgccgattgcttgcccttctccactctagataggtctggattgggggagagcaagcactgctggatcgggaagacccaagtgaccaacgcgtcgcatcagaataaggcattttgagtgctgtatgatgtgtgtattctggctctgaaagtgagacctgcttttgttataatacatacatacaggcagcatggcaat

SEQ ID NO: 242 - DNA, 876 bp, Glycine max
  CDS (96)..(713)
attcggctcgagctaactggcaactaattaacgtgtttgggactcgcgagttgtgcattcctaacacccatttcaggaagcccaagcattgggagatgactagaaagaggatacagatcaagaaaatcgacaacatcagttcgaggcaagtgactttctccaagagaaggaaagggcttttcaagaaggctcaggagttgtcaaccctttgtgatgcagacatagctctcatagtcttttctgcaactagcaagctctttgagtatgccagttcaagcatgcatcaagtaattgaaaggcacgatcgctattcagcaatccatagattggatcgcccctctattgagctgcagattgagagtgactccaacaacattctgcgcaagaaagtagaagataagactcgtgaactgaggcagatgaatggggaagatctgcaaggattgacattacaagaactgcagaaactagaggaacatcttaaaagaagtttgaccaatgtttcaaaagtaaaggatgcaaaatttatgcaagagatcagcacctttaagagaaagggagtggaactaatggaggaaaaccaaagactgaaacaggtgccgagccttatccatgcacatagctataggcaatcatcggaatccattcttagcaattcatctaaccttcctgaagatggtggtagcaacacatctctcaagttggggttaccttaaataatgaacaaaatgtagattatttagaagtgatcggtttcgcttcctttatatgtcagtcaaaaccaattgaatatcctgtgttgtttgctgtttaaaaacaactcgtgtaaagtaagtaaatccaaaggatgaggtcctgcatgtagaattgtgcttg

SEQ ID NO: 243 - DNA, 999 bp, Glycine max
  CDS (60)..(674)
cggacgcgtgggcccaggcattggtgggttcttaccctttattattattattattggagatgactagaaagaggatacagatcaagaaaatcgacaacatcagttccaggcaagtgactttctccaagagaaggaaagggcttttcaagaaggctcaggaattgtcaaccctttgtgatgcagacatagctctcattgttttttctgcaactagcaagctctttgagtatgccagttcaagtatgcatcaagtaattgaaaggcgcgatagccattcagcaatgaatagactggatcgcccctcaattgagctgcagattgagaatgactccaatgaaatcctgcgcaagaaagtagaagataagaaccgtgagctgaggcagatgaatggggaagatctgcaaggattgacattacaagaactgcataaactagaggaacaccttaaaagaggtttgatcaatgtttcaaaagtaaaggatgaaaaacttatgcaagagatcagcacgcttaagagaaagggagtggaactaatggaggaaaaccaaagactgaaacaggtggtaccgagccttatccatgtacataggcaatcatcggaatccattcttagcaattcatctaaccttcctgaagatggtggtagcgacacatctctcaagttggggttaccttaagtattcaacaaaatgtagattattagaagtgaccgggttcgcttcctttatatatgttttaagtgtttcactcaaaaccagttgagtccagtgatgtttgctgtttaaaaacaactcctgcaaagtaagtaaatcctagggatgaggttctgcaggcagaattgcatgtacttgaattcgtattctattttcttttcgtagattgattcataggaagtgttatatatgcccgagttaatggtcaatgctttggccgtttcttactttctatactttgtcatcataaaaaaattattcttacctaaaaaaaaaaaaaaaaaaa

SEQ ID NO: 244 - DNA, 1036 bp, Triticum sp.
  CDS (149)..(736)
gggagagcagagagctagtcgctcgcgcgggcaatccaaacctttccctattcttgcaaggtctcggaaacggaaaggcccctgctccgctgcgcgtttgcgagtttgggaagaagccttgcctgccggagggggggaaacgggcgagatggggcgagggcgcagcgagataaagaggatcgacaaccccacgcagcgccagtccaccttctacaagcgcagggacggcctcttcaagaaggcccgggagctcgccgtcctctgcgacgccgacctcctcctcctcctcttctccgcctccggcaagctctaccagtacctcgcgcccaccgtcccctctgtcaaggagttcgtcgagaggtacgaggcttcgaggcacaccaaagtttggtccgacatccgccaggagaggcgccgcgagctggagaaggtggccaagatgtgcgacctcttggagaaggaactgaggttcatgacggtggacgacggggagcggtacacggtgccgtcgctggcggcgctggagcacaacctggaggcggccatgcacaaggtgcgctccgagaaggaccgcaagatcggcggcgagatgagctacctcgagaacatgatcagggggaaacaagcggagcgctacggtctgtgtgacaagctcgctcatgctcagagcctcaaggtcgttgaaggtggatccacctcgctgaacaacggcctggacctcaaacttggattcaactaggaacgggtgaaagcttctggccgtggggttctgctctagtgttgcttttgagctcgagtgttatgtcaggttgaaatattctgcaatttccttcgaagggattgtatgaacttgtaagagaccactgtcttatgagatgtttggcttaggctggactgggctgtgcgttgtacctccaataggtggaatgtgataccagtccagtattgcaataatgtagttaacggtcaccttatgctctagttcatgcgttctttgtcaatgtggactattcgtgtttttcttgatttctgccag

SEQ ID NO: 245 - DNA, 972 bp, Zea mays
  CDS (75)..(749)
tggagagccattcgtgggcgtaggacgagagagagaggatcggagcagtacgcggcggcggcggcgtgtgggagatggcgcgcgagaggcgggagatacggcggatagagagcgcggcggcgcggcaggtgaccttctccaagcgccggcgcgggctgttcaagaaggcggaggagctcgccgtgctgtgcgacgccgacgtcgcgctcgtcgtgttctccgccaccggcaggctctcgcagttcgcgagctccagtgtgaatgacatcgttgacaagtacagtacacattctaagaatctggggaaatcacatcagcagccttctattgatttgaatgtagagcagagcaaatacagcggcttgaacgagcaacttgctgaagaaactaatggacttagacagatgagaggtgaagaccttgagggattgagtgtagaggaattgcaccgaatggaaaggaaacttgaagcaggactgcatagagtgattagtacaaaggaccagctattcatgcaacaaatcggcgaattactgcaaaagggcacacagctagaagatgagaacaggcgtctaaaagaacaaatgcctcaggtgctaacggctggcacaatggtggttgctgctgctgcagaaaatatcctcactgaagacgggcagtcgtctgaatctgtaatgactgcattgcattcaggaagctcgctcgactgtgatgatggttccgatatatccttgaagttgtcgttgccttgaaaggaaggaccatcgcatcgcatgttatctgcatgagtggggctgacaccagtgcttctaagaagacaaagactgggatagtcccattcgcggcattatattggtttaaccagatgtgctgtccttgtgcatgtctgtacttcaaagtggctaacgcgaaatttgtatatataatagtgtatgcgctgcgttatcttcgttctaaaaatctgtattgttt

SEQ ID NO: 246 - DNA, 1419 bp, Zea mays
  CDS (304)..(774),(956)..(1219)
caccgctttaaatccgcctcctcccagcgtctccctcctcccggcctgtcccctcacctcctccccctatctctccaccgccgcagctagctgtgacgtcatgcactcgccggcgccaccgccaccgcatactatctacaattagccagccgtaggcttacctatcctgtgtcaagcaagcctctcgcaagcaacaaggaaggaagctagctagttttatagctgctgtcggcggcggcggctgaagcgacgtgcctgggctaggatttaggttgagatcaggagagggagaaggcggcggcgatggggcgcgggaaggtgcagctgaagcggatcgagaacaagatcaaccgccaggtgaccttctccaagcgccgctcggggctactcaagaaggcgcacgagatctccgtgctctgcgacgccgaggtcgcgctcatcatcttctccaccaagggcaagctctacgagtactctaccgattcatgtatggacaaaattcttgaacggtatgagcgctactcctatgcagaaaaggttctcatttccgcagaatatgaaactcagggcaattggtgccatgaatatagaaaactaaaggcgaaggtcgagacaatacagaaatgtcaaaagcacctcatgggagaggatcttgaaactttgaatctcaaagagcttcagcaactagagcagcagctggagagttcactgaaacatatcagaacaaggaagagccagcttatggtcgagtcaatttcagcgctccaacggaaggtaaattgttgagcttgctaaagttggctgttcgaacttcctcttttaagaattgtatgatttctttagctggccattagatgggcatggtttattgcaagtgttaactactttggttgccttgttacatccacaaaatatctctgctcttgcgctgtgctgcgatgcattgttaccgcaggagaagtcactgcaggaggagaacaaggttctgcagaaggagctcgcggagaagcagaaagaccagcggcagcaagtgcaacgggaccaaactcaacagcagaccagttcgtcttccacgtccttcatgttaagggaagctgccccaacaacaaatgtcagcatcttccctgtggcagcaggcgggagggtggtggaaggggcagcagcgcagccgcaggctcgcgttggactgccaccatggatgcttagccacctgagctgctgaaggtttgctctcatcgtcgcagtgtgctagcccaaaatccagcaagtcttccccggaccccggactggccaagcttctccgcctggtgcagtatcgtcgtgatcgcgagaagcagcagcagcggtttgccgtattttttaccaccgtgtataagtagcatatctgcaatgtgtatattttgttcaccgttcctgctg

SEQ ID NO: 247 - DNA, 2000 bp, Arabidopsis thaliana
  CDS (329)..(1267),(1353)..(1562)
tagaaaaagaaaacaaaacagtgcatcgtcgtcagtgggagtatataactaccaccacccactcaccattccggaattatctctgaatcactcataaaccctttcttcttccttgttcaaatccactcactcttggagagagacgactcaaacgcatagtctctcctctgtatttactcgttatcgtcactgtgagagagagagagagagcgcgcgcattcccccaattaaagcctctctgctccaaaccgtgatatactctttacgttgtttgtttttgcctttatccttccctagttgtgtataattttgttcttttcttatggagatggatctcagcaaggttactcttgacattttcacaaagcttgaacagaaatggctctctcactgcgactcctcccggaagactcgtatccttagcatcgacggtggcggtaccactggcattgtcgccgctgcttctattctccacctcgagcaccagatccgccttcaaaccggcgaccctcacgctcacatctctgatttcttcgacattgtcgccggaactggcatcggaggcattctcgccgccctccttgtcgccgacgacggctccggcaggccgatgttcactgccagagacgcggttaagtttgtcgcggagaagaactcggagctcttcgagatcaggtacaccggagttttcaggaggaacaagagatactcggggaagagcatggagagggttttggagacggcgtttaggagagaggacggtaaggtgttgacgatgaaggacacgtgtaagcctctccttgttccttgctacgacctcaaaacctctgctcctttcgttttctcacgcgccggcgcgtctgagtctccgagcttcgacttcgagctgtggaaagtctgccgtgccacgtcagcaacaccaagcctcttcaagccgttcagtgtagtgtcggtggacgggaaaacctcatgctcagccgtagacggcggtttggtgatgaacaatccaacagcagctgccgtcacgcacgtgctacacaacaaacgagatttcccgtcagtaaacggcgtagatgacttgcttgtactgtcgttgggaaacggtccgtcgaccatgtcatcatcaccagggaggaaactccgtcgtaacggagactattcaacgtcaagtgtggtggacatagtggttgacggcgtttccgataccgtcgatcagatgctggggaacgctttctgctggaaccgtactgattacgttagaatccaggtacgtattctcaacttttctcgtcaccacagagatcaccgatcaaaatgtctcgaatatattaaaatgtggtggatgcatgcaggcgaacggtttgacgagcggcggagcggaggagttgctgaaagagagaggtgtggaaacggcgccgtttggggtaaaacggatactaacggagagtaacggagaaagaatagagggtttcgtgcaacgtcttgttgcgtcaggaaagtcaagtctacctccaagtccttgcaaggaatctgccgttaaccctctcgctgacggccgttaagtttcctttattattataaccctccccgtccgtgatgtaagaagtttgtaaccaaacccctgggttaattttttaaccccagccagcatcttcgagttaattaattagcctttctttttttctaatgactttagttgaggaattaataatggttaatgaatgatagtctttacttatttatcactgacttgctagctagcagcttctctaaccattttttttaatactagtactgtatttgctattcccttggatcaaggcccgatgattctgtcaaaactgttttccccaaatgacttttatatgctcttccaacccaaaaaaatacaagtaaatgagaacaaaaactcaattcagagcaatgaatatatatacacaattagaaaatctccaattaaagagataggcattgctttagaactttgttatattgaagga

SEQ ID NO: 248 - DNA, 2601 bp, Anabaena
  CDS (451)..(2184)
aaaagtctaggttaagtgcgttggagttaaaaatatatgggactcctatgggattttggcacaaaactaccatagcattgggatcagtgtacaagtcttataggaaagaatgatcagtcagcatttagaaactacgacacttgtagtgtgagtattgcagcaacagtcaatatatttaccaacaagctatattgcctgatagataaaaataaattatgtatatagttccgttgattaattacaaattatatgatttggagatgaaaatgttgtgacaaatcaagtaaatacccaatcagttctgacatttgatggtcaagatgactacataaattttggcaaaaaatgatattggtggtgtgtttgctcaggggagttcagcctttacgatttccggatgggtgaatccgcatcaactcaccaataaagcaactacatacggggcacacaatgtattttttgcccgttcttcagaccgatacagtgataattttgaatttggcatcagtgagagaaggtaatttagatgtatacattgatgaaaatattgacaatgttattaaaacctttggcaatggagaattaaccatcggacaatggcacttctttgccattgtttttaatggtggtcaactgactatatatcttgatgaccatgaatatactgggtctttgacaggttcttctttgaacaaagcaactagtcctataaccatgggggcgactttacacaataatgtatactttacaggacagttggcaaatattagcgtctggaattatccctgcactcaagaccaaatccaaacgcatcgctctagtcctctagtcggaaatgaaccaggattagtagcctactggagattaaacgaaggagaaggaacaactgtccaagaccagagtggaaatacccataatggaaccttgtatggtgatcccagttggaatttagcacaagttctatttgcgatcgcacaatcatccagcgagggacacagaccaagtagttcacctgcagagatagccgaaatcgcccaaactaccgaatacccaatcccagacaatattcaacaacaggaacaagcgcaaacaccctctcaagaggaatcgaaacaaactatgaataatacagcaaatcccaaatataaaatacttgctattgatggcggtggtattcggggtattatccccgcaatcatcttaactgaaattgaaaagcggacacaaaaacagatttttagtttgttcgatttaattgcaggtagttccagcggaggaattctcgcactcggactaactaaaccgcgattagatttagcaggatctgatagcccacccgtcgcccaatacagcgctgaagaacttctgcaaatatatttggaatatggggctgagatattttacgagccattctgggaacaattactcggacagctagaggatatattcgttcaaccaaaatattcttcagaggggagagaagaaattatcaagcaatattttggcgacagccctttagaaaataatctcaaagaagttttcgtaacgagctacgatatcgagcagcgaattcccatattctttactaataagctcgaaaaacaacagactaaatcgaaaaagtttcgcaagttatgcctaggttttacgctcacagatgcagcattggcaactagtgcaactccgacttattttgctccctatcgtgtttccagttcccataataccaacggcttctatacattagtggatgggggattagttgcgaataatcccgctaatttggctattttagaagcgcaaattagtaggcaagaaaatcaacaagccctgaatatggaggatatcttggtagtatccttgggtaccggttccctgaccagtgtctacccttatgaccaagtgaaaaattggggactattgcaatggacaaagccgctgttaaatatggtgcttgacggcgggagtgaagtagtagctggagaattagaacggttgtttgaggctactaataaaggtcataaaacttcttattatcggtttcaaccattcttaaaaagtgaactcgaagatatagataatgccaaaccagaaaatctgcgccaattacaaactttagcgaatatactgattcaagaaaaaaatcaagaaatcgatgaattgtgtagtatcttgtcaagttagggactgccaaaataaaaaatatcccatatttagggtgcgtcagccgaacggttattaattgaaatcacagattgataagattgtcagcaaaagtatcacaattttaggtaattacaatggacgaaatcgttaaaaaattggctggtctgggtcttcctggcataattctcgtggttttagcagtttcatcagcaggtagtaatgctgctattattgctaccctcacatctgtgggaggaccgtttggtatcctcggaggtataggtctgcttggtctgacaacagttgtaggggatactgtagcaggctatggaattgaagctattctcaaggctatatatacagaacgtagcaaaaccgaatcagtcagatttctgctcaaagaaattaaagatttgcccatttcagacgacctaa

SEQ ID NO: 249 - DNA, 1135 bp, Zea mays
  CDS (86)..(805)
gtcgaggagtagggttctagcgcctatctggtttctccctgcgccgccgccgccgccgtggacaaccggagcgtagtgggaggggatgatggagggaggtagccgcgcggatgggcggaatccgaaccagctccggccgttcacctgcaccgggaacccgctccaccgcgcccacggctccgcgcggtgggcgcagggcgacaccgtcgtgctggccgctgtgtacgggcccaagccgggaacccggaagggcgagaaccccgagaaggcctccatcgaggtcgtgtggaagcccaagaccggccagatcggaaggcaagaaagggaatatgagatgacactcaagaggacgttgcagagcatctgcttgctcacagttcatcctaacaccaccacctctgtcgtgcttcaggttgtgggtgatgatggttctcttatgccatgtgcaattaatgcttcttgtgctgctcttgcatttgctggaatccctatgaaacatctcgctgtcgcaattagctgtggagtgatggacaatggtgtggttatcttagacactagcagagcagaagagcagcaagctaggtcgtttgctcacctggtgtttccgaactcgcgcaagtcagtcgaatcgaaggacccgacacagcgagatgaggagtccgagcgaggattgataacttgcatcacgcatggagcaatgtctgaagatgactatttcaactgcatagagaggggtgtcatggcgtcctcgaggatctcggatttcatgaggaagacactgcagaaggaggcgtccagggatgcctgacctgagtagcaaatgtattagcacgactgagaagctgcctgcctgtgatagacgatggcgatggcaatggtgtgtagacagcagctgggtctctagtttagacggcatgtagtcgtgttagaacgaaggaggcaagggtgcggagtggaggtcaatcggcgtgtgatgccatgtctcaattgtgcggtggagtggtttggtggacttttgatgaacagataatgaggttgtatttggtggtacccaattgtgtgtgttgaaatcatatgatgcacggcacgctgaaattttactcgaacgccgcccgattaaaacaatatccatact

SEQ ID NO: 250 - DNA, 5218 bp, Saccharomyces cerevisiae
  CDS (1351)..(5211)
tctagaggaagttttcaattccaaatgggcggataggctaatttggatgactacgattccgatgaagattcgaggacccaaggcgactacgacgattatgaatctgagtattcagagtctgacatcgatgaaactataattacaaatccagccatccagtatttggaagaacaacttgctcggatgaaagtggagttgcaacaattaaaaaagcaagaactggaaaaaataagaaaagagaggcgcttacgacgtggatcaaagaaacgcggcaaaagatcgaagggaaggagtgggtctaagaacgcttcttcgaaaggaaggcgagataaaaagaataaattgaaaacagtagtgacatatgatatgaaacgtatcattacagagaggatcaatgatttaccaacttccaaattagaaagagcaatcgacataataaaaaaatccatgcccaatatttctgaagacgatgaagtagaacttgacctcgacactttagataatcacaccatcttaacattgtacaacactttctttagacaatatgaaagctcatccggtgcttctaacggtttggacggtacttcaggtgttacgcgagatgcttcgtccttgtcgcctacaagtgcgggaagcagaaagagaagatctaaggcattaagccaagaggagcagagtaggcagatagaaaagataaaaaataaactagctatcttagacagtgcttcacctctgagccaaaacggctccccaggccaaattcaaagcgctgcacacaacgggttttcctcatcttcagatgacgatgttagcagcgaaagtgaagaagagtgactgaattttgaatttgattatcttcaacgactgagaagaatgagcaccattttgatattttgattaattaagtggtaatcttaagctcatatacaaaaagggaaggaaaaaaaataaagatagaaaagatcttaggaacggatagaggtttgaaaaaggaataacaggtaatttttcattttcatatcggttgtaacattataaagctcacaaatttaaaacaaaaaaaaacataaacctaacaaggttaatcatttgcacatgatctcatcatatagatcaattcataatctatataataatgaataattagaataaaaatttcctcttgtctcagaacgcccatcggatggcataactttagttaatgatatcacgacggacgaagtattgaaagacaacctaacctgttcatcaatttaaaagtcaacgcagaaactataatacattgccacatagttctttccgatatgaacaacctaactcacaaaatttactgtactaatactaatttatatgtctgagggattcagtagcagttccatacaggaattatatcaatcgttaaaagaaatcactaacaacgcagacgtagagcttttcgaagatcgcattactaaattagattttgagagcaccgatgaaccaaagcatgcaaatgatatcataaaggatagatttttgagaccttctaatgctcttccttggagcttgttggacatggtccaagacgttccacatacgtcttctccagaagattgctctggtaaactagattacaaggaattgctgaaagtcccggacccaattaatagaacatcataccagtttaaaagaactgggttagaaggtaaaatttcaggctacaaagaagaggttgatttgaaggaagttgcaaatgccaatgcatcaaattcactgtcgattacgagaagtatcaaccataaccaaaactcagtaaggggttctacagcgcaattgcctttcacaccaggcggaattcccatgaaatctgtcaagacagattcagaacaaaatggatcttctacaatggccaacgctactaaattgttacacaaggatggtcaaggtttattcgatattccagagggtatgaatagaggcattaagccgatggattctccagctgaaaatgaggatcaaaacggacagttcaaagaattgaaacagctaaatgagatagataatgaattagacataaggattgaggcgaacgaggcaaagttaaaagaggaggaaaaatctgccaagtcaatttctgaagaaattatggaggaagccactgaagaaacgactgccgataatgctgatgatgccgaaatcgatgaactattaccaattggaatagactttggcagaactaaaccagtttcgaaaagtgttcctgttaaaaaggaatgggcccatgttgttgatttgaaccataagatcgaaaatttcgatgagttgattccaaaccccgctagatcgtgtccttttgaattggatacatttcaaaaggaagccgtctatcatctcgaacaaggtgattccgtatttgttgccgcccacacatctgctggtaaaactgttgttgcagaatacgcaattgccatggcacatagaaacatgactaaaactatatatacatcacccattaaagccttatccaatcaaaaattccgagactttaaagaaacttttgacgatgttaatattgggttgattactggtgatgtgcaaattaatccggatgctaactgtttgattatgacgaccgaaattttaagatcaatgctttatagaggtgccgatttgatcagagatgtagagtttgtcattttcgatgaagttcactacgttaatgatcaagaccgtggtgttgtctgggaagaagttattattatgcttccacagcatgtcaagtttatcttattatctgccaccgttcctaacacttatgagtttgctaattggattggaagaactaagcaaaaaaatatttatgtcatttccacaccaaaaagacccgttccattggaaataaatatatgggctaaaaaggaactgataccggttattaatcaaaattcagaatttttagaagctaatttcaggaaacataaagagattctaaatggggagagtgcaaaaggggctccttcaaaaactgacaacgggagaggtggatccacagcaagagggggccgtggtggatccaatactcgagatggaagaggaggccgtggtaattcaacacgtggaggtgccaaccgtggaggttcaagaggtgctggcgcaattggctccaacaagcgtaagtttttcactcaagatggtccttcgaaaaaaacatggcccgaaattgtcaattacctaaggaaaagagagcttctaccaatggttgttttcgtatttagtaaaaagaggtgcgaggaatatgctgactggttggagggaattaacttctgcaacaataaggaaaaatcacaaatccacatgtttattgagaagtcgattactcgtttgaaaaaagaggatagagatttgcctcaaattcttaaaaccagatcattacttgaacgtggtatagctgttcatcatggggggctattgcccattgtcaaggagttgatcgaaatattattttccaagggttttatcaaagttttatttgcaacagaaacttttgccatgggtttgaaccttcccacaagaacagttatctttagcagcatccgtaaacatgatggtaatggattaagagaactgactccaggtgagtttaccctggctggtagagctggtagaaggggcttggattccactggtacagtcattgtgatggcatataatagtcctttatctattgctacgttcaaagaagtaacgatgggtgttccgacgaggttgcagtctcagtttagattaacatacaatatgatattaaatcttttaagaattgaggcgttgagagttgaagaaatgatcaagtattcttttagtgagaatgccaaagaaactttacaacctgaacatgaaaaacaaatcaaagtattacaagaggaattacaaaccatagagtacaaaagttgtgaaatctgtgataatgatatcgaaaagtttttggaattgatgctggcatataaggaggcaacagtcaacctaatgcaagaaatggttaaatcgccttcgatattgcatatcttgaaagagggcagactcgttgcttttagggaccccaatgattgcttgaaattaggatttgtatttaaagtttctctgaaggatgctgtttgtgtcattatgacgttcacaaaaccatacaaactcccaaatggtgagccaaatcatttaatatactttccaaaagcggatggatacagaagaaggaacttccctaaattccagaagactgatttttatatggaagaagttcctgtgacggctattgaagtgatcactaaacgcaagtttgccgcacccttgggaaaagtgattaaaaaggatgttgccgctttgaacgagtttaacgctgaaacaaataacattttggacggcaaaacgctaaaagaagcaattaacattgaaaagcaaggtttaaaaattcaccaaatattgttagaccgtacaaatataagggatgagatattcaaactaaaaagcattaaatgtcccaacctaagccaacacattgttcccaagtttaaggcgcatgtaattaaaaagaaaattgaagaattgtaccatttgatgtctgaccaaaatctgagcttactacccgattatgaaaagagattggctgttctgaaagacactgaatttatcgaccaaaaccacaacgtgctgttaaaaggtagagtggcatgtgaaattaattctggttatgagttagttttaactgaattaattttagacaactttttaggaagctttgaacctgaagagattgtagccttattatcagtatttgtttatgaggggaaaaccagggaagaggagcctcctattgtcacaccaaggctagcaaagggtaaacaaagaattgaggaaatttacaagaaaatgctttgtgttttcaatacgcatcagattccattaactcaggatgaagctgagtttttggacagaaaaaggtttgccatgatgaatgtggtgtatgagtgggcccgtggtttatcattcaaagaaatcatggaaatgagccccgaggctgaaggtactgtagtcagagttatcacttggctagacgaaatttgccgcgaagttaagactgcctctattattattggtaattccacattacatatgaagatgagcagggctcaagagttgattaagagagatattgttttcgccgcaagtttgtatttatagagagctc

SEQ ID NO: 251 - DNA, 5192 bp, Saccharomyces cerevisiae
  CDS (793)..(5091)
tttgtaatgcaaataactggacgagagaaccacgctataacctatttggtaataaaaatgtttgtatgaataaaaaagctgctgactgctttctttgatatgtgtatatagaatatttaatcggtgattgaatctaagaaaagcttacctctgaaagttctctcttcggtcgcttgctgatttgtagtaaacaatttgaaaagtttagcaaattcttcctcaggattttcaaaaccggcttcctttaaagaatcaatgacctcattcaagggaacgtttaaatcgtgtcctcttccaatggcttttaaactttcttccaattcttcacgctcgggaaactgcgataagttcttccccatgatagataagaatatgggaaagcttacaccttcttctccaacttccgcggtactggtgtcattgtcaggtaccattttggaccattcctcatctgtcaatgtcttccccaatgttgcatatatcttggtaagatctcccctactaatcagaccatcctcatcctcatccagcatttggaaagcatctttgagtttatttatgtagtcctgcgtaagttggttaaacgttagcgattcactatggtccatatctacttcaagtttgctcaataaacgattcgaaattactcttttcttagctgtgcattgtatagtttagaaatacgagaaatgtaaaaaaaaaaataaagttggaaaacaactaactaataaaactttcttgtcaagaaagacactaagaacacagaaaagaaacacgaagagcagaggaaatatgtcggatattaaacagctattgaaggaagccaaacaagaattgacaaatcgtgactatgaagagaccatcgaaatatcggaaaaggttcttaaactagatcccgataattatttcgcacatatttttctagggaaagcactttcgagtcttccagctagtaataatgtcagttcaaatcggaacctggagagagctactaatcattacgtgtccgctgccaaattagttcctgataaccttttagcgtggaaaggactttttctcttatttagaaccactgaggttgtcccagacatactttcgtatgatgaatattttgacctgtgtggccaatatgcagacgcacttttaaagcaggaacagtctcaagtagaactaataaatgacataaaattactaaagaaaacgcatccagattgtcaaaaagccttttatcagcatttgaaacctgggtcgctaatggcggaaactattggtcgtcatctatctacaccccaggacgctttattaaatcttataaagatactgtctaatattgaaacaacggaaataggtaagacccttagtcagaacaggttaaaactaaaagctagtgatcctgattatcaaattaaactaaattcattctcctgggaaataattaaaaattcagaaattgatcagttatacaaccagttggtaaatattctcgctgacgatcaaaagagaagtgaaattgagaaccagtggttagaatatagaatcaaagtgctaaaatcaatgccgctggatgtaaaaaaagattttttcacgaaagttaaggaaatggtcgaggatatggttcttgtgaatcatcaatctttgcttgcatggcaaaagtatttcgaatggacagattacgaagatctggacaacatggatgccccattgataataaagtactttaagaaatttcctaaagatccattggccatgatcctctattcctggctttcctcaaaactatcgaaatatgatattaaaagtttggaatcggctaataaaccacctgaaggccataaaaagacggagaaggaaacagatattaaggatgtagatgagacaaatgaagatgaagttaaagatcgcgttgaagatgaagttaaagatcgtgttgaagatgaagtcaaagatcaagatgaggaggcaaaggaagatgaagaagaagaccttgatgatatagaaattggtttattagaggaagaggttgtcactgtattgacggagaatatcgtaaaatgtaaaaataatatcttagcgcatcgcattctttgtcaatattacctactgaccaaggagtatgaggcagctttaccatacatcaaaaatggtatttctttaattgcctataatataaaggacctgggggtacatttgccattaacaaaaagagaattttctctggatttggctaccgtttatacatatgtcgatgccccaaaggaccacaatgctgcattaaagttatatgataacattttatccggtgattttagtaatatacaagcaaaaatgggcaaaggtataatttttattgaaaggaaaaattggaaggatgctatgacattactaacacaggtgcatgaacaatcgcctaataatctggaagttttatctgaactgtcatggagtaaagcccatatgggttatatggacgaggcattagctggcttagatactgtcatcaagggtatcaaaggtatggatttacgttcgatagatttcagagcattaaacttatggaggcaagccaaagtttacattatgaagcatgcttccattaacgatgctaaacaggaaaacgtcaagtgcgcattcaaattactcattcagagtattaaaatattggacacttttgctcccggattttcgacactgggcgatatttattgccactattataaagaccatttgagggccttcaaatgttatttcaaagctttcgatctggatgcgggggattacacagcagcgaagtatattaccgaaacttatgcaagcaagcccaattggcaagctgcttcttccatcgcttcaagattaattaaaggtgaaaaagcaaaggcagaactgcgctcaaataactggccctttagggtcgtagggattgctcatttggaaaagcaagaagaaagtgattctattgagtggtttcaatctgctttacgtgttgatccaaatgatgtagagtcatgggtgggcctgggacaagcataccacgcgtgtggtcgtatagaagcatctatcaaagtttttgacaaggcaattcaattaaggccctctcatacttttgcccaatactttaaagctatttctctatgtgacgtaggtgaatatcttgaaagtttagacattctggaaaaggtatgtcaagaagccgctacagaagagtcattccaaattggtttagtggaagtgcttatgagatgttccttggatttatattcgcaagggttcttgctcaaatcagtttcaattgcaaaggacactattgaacggatcaagataattatcagtgaattaaaatgtgagaaccaacaggtttggatctacctttcacaagtactgagattatttatttggatagagtcaaaggttgatactttacctgttgaatcactagtatcaatttttgaaaattctcaattttctggtagtgaagaaattgattctgtcgacaatatcaaaatcgatactttactcgatagcactactgatgataatgtgtccattgcgtgcaagtttttgatcttagcttcaaaatatagtgtttcggatcaaaaatttacagatatagcaggaacggtcagggcctcatactggtataatataggtatctcagagcttactgctttcataacattgaaagaaccgcagtatagagatgctgctatttttgcttttaagaaatccattcaattacagtctaatataagtgaaacttggattggtctagggatagccactatggacatcaactttcgtgtctctcaacattgctttattaaagcaactgctttggaaccgaaggcgacaaatacatggttcaacttggctatgctaggtttaaagaaaaaggatactgaatttgctcaacaggttctgaataaattacaaagccttgccccacaagattcgtcaccttggctaggtatggccttgattcttgaggaacaaggagacattatcggaagttctaaactttttgcacactccttcatattatctaatggaaggtcaaaggctgcgcaatttatgtatgctaaaaatgtccttgagaatcacattaataatggtgacgatgaaagagatattgagacagtggaaaaactaaccactgcttcaatagctttagagcagtttttcaaaaaaagtcctgatagtcaatttgctcttcaatgtgctcttctaactcttgaaaggttacatcactatgaaaatgcaaacgaactggctaatcggttgataggcattttggaaaaaaagtttgagaaaactcaagatgaaagagaactgtttaattttgcgataattaaaggacaattcgctcgtattcacttaggtttaggaaatttcgaactctctattgaaaacgctgatctttctcaaggtattatatctgaatcgagcgacgaaaaatcaatgaaaaccaaaatatccaatcacatttgcttaggattaagttatttcttcttaaacgactttgatcagactttgaaccaattccaagaactgctaagcatttcaaaggattctaagcacctagttgttttaattgcgaaggtgctttatgatgtaggtgaatctgacacaaaggaaattgctttacaggaactaacagaatatatagccacaagcggcgcagacttgttagtaacactaacgattgcagctatgtcaattctagacgataagcgtgaagatttaagcattattttagaagaattgaaagctttgccattatccaaacaaataatagataagcacaaagacgcaccatatctgatagaagaaattactaagagactttatcgtaacgataccggtaaacaagtatggcaaaggagtgcgtactttttccctaataacctcaaggtttgggagagattagataagaatattcaacgaagaatagcttctaatggacaaaataaagttactgcggaggagatgagtaaactatattgtgagagtaagaatttgagaagcatacaaagaggtatgtttttgtgcccttggaacgttactgcagtgaaggcgctaaacgaatgtttctaaaaatttggattcgagatagtcaatcaaaccttaatgtaacattagtaataaattttatcttttctatagagtataaaaggttattagacagagtttatcag

SEQ ID NO: 252 - DNA, 1386 bp, Saccharomyces cerevisiae
  CDS (323)..(1201)
agcagaaaactgggagaaatggaaatgaatcaaatcatacatatcaagacattctagtttttataaacctataatttatcgcaagaatcttgggtgttatgtgttgtatttgcggcatcatttcaaaataccgtctgcattacccgtctccgtcacgtgaagtaaaaatttccaaaaaatattgaaaaaagaaagaaaaataagatccagaattcactgatgatgagcttatggtacggcatgattaactacgcatttgtatattaaagattctttgattttttccagagcattgaatacctcaatctataagtgtattataatggcatgcaattttcagtttccagaaatagcttatccaggtaaactaatatgcccacagtacggtacggaaaataaagatggcgaagatataattttcaattatgtgcccggtcccggaactaaactaattcaatatgaacacaacggacgaactttagaagctataactgctacactagttgggacagtgaggtgtgaggaagaaaaaaaaactgatcaggaagaagagcgtgaaggcactgatcaatctacagaggaagaaaaatcagtagatgcatcacctaatgatgtcacaagaagaactgtaaaaaatattctggtttcagtgcttcctgggacagaaaagggtcgtaaaaccaacaaatatgctaataatgattttgccaataacctaccgaaggaaggtgatattgtgctgaccagggtgacaaggctttcgttgcaacgagccaatgtcgaaattttagctgtggaagataaaccatctccaattgatagtggcatcggcagtaatggatcgggaatagtcgctgctggtggcggttctggagcagctacgttctctgtttctcaagcatcatcagatttaggtgagacattcagaggtataatcaggtctcaggatgtacggtctacagacagagatcgtgtgaaagtgatagaatgtttcaagccgggagatattgttagggcgcaagttttatcattaggtgacggaaccaactactatttgaccactgcaaggaatgaccttggggtcgtgttcgccagagctgctaatggtgctggtggattgatgtatgctacagactggcaaatgatgacttcaccggttacaggcgctacagaaaagcgcaaatgtgccaaacctttttgatatgtaacagcttatctacagtgcatatagacgcgtatatatttaaaagagggtattcgcttcttcttctttagattgcattctttgatggttaggaaaaagaagcgggaacgtgattaaactttttattctcttttatttattatatattatagtgcattatcattatctatctaaatttgcct

SEQ ID NO: 253 - DNA, 1857 bp, Saccharomyces cerevisiae
  CDS (1007)..(1747)
taaagtactaatctcatcctccttttgtttttctcgagagggcccccttattcgtccgcctgagattgcattggccgaattgaaaagtgacagttatgcacctcagcggctattccctgcgtcgcttgctgaagattgaggattataggaagtagtaagctggaaatggtaatttgtaaaaagaaaatttctaatactgtgacaatgttattaaatcggggttgtttttgtttggggcggccagcggaataatttgttttcaaggacagcagaagctcagaagaacaaaatctccgtgatcttttaaacttttttccattctgatggaataatggtcttgatcccctaaatatttccttttttattgcaattatgatagaaattaatagtagtctatgctggatgatatatatatctcttttgagcttgcttcaaattttttcccgttataatgatgagtgttttgcttattaagggtctaggacatttctatcagtttctataccaaaagaagaaaaagtggagaattgtttgtttattttaatattttgttctttagttttaaaaattcagaagagaaaaaaattttatttgtcacaaggaaataaaacataaacaaaaaagaaaaattaagatttgcaattctgccgcttaagcaaaagtagatcattcactggaatatatatatataaacgcatttataatcttgtaacgtgcactcaatttagctacgaaagccaaccagcaaggaaccttttatttgagtaggtacatttacatcttcgggtaacgcggtgaaattgaaaaattttaaggcattaataattgaaaagctagaagaaatggatgaatgaatgacattgcgaaccattgtgcaatgaacatcatccaaaagaaaacatcatttacacatattttctttccagggtcccactggtaaaatctattaacatataaaaagatttacaaaaaaactttagtgccataactacagcaggatcatcatatgtcaagactagaaatatactcgccagaagggctacgtctcgatggacgtcgatggaatgaactccgccgttttgaaagttccatcaacacacatccgcacgctgcagacggttcatcctacatggaacaaggtaacaacaaaattatcactcttgttaaaggtccaaaagagccaagattgaaatctcaaatggatacctcaaaggctttattgaacgtatcggtaaacattacaaaattctccaaattcgaaagaagtaaatcaagccacaagaatgaaaggcgtgttcttgagatacaaacctccctggtgaggatgtttgagaagaatgtcatgctgaatatctaccccagaacagttatcgatatcgagatccatgtccttgagcaagatggcggtattatgggatctttaatcaacggtattaccctcgctttaatagatgccggtatatcaatgttcgattacataagtggtatatccgtcgggctgtacgatactaccccattattagataccaattcattagaagaaaatgctatgagtacagtgacactaggtgtggtagggaagtcagaaaaactttctcttttattggtggaagacaaaattccgttagataggttagagaacgttcttgccatcggcatcgcaggtgctcatagggtaagagatttgatggatgaagaactgaggaaacatgctcagaaaagagtcagtaacgcctctgctaggtagaataaaaaacgccattaattgccactgtttatataaaagtacataaaaaacagtaaaattgaaaattgaacgcatttacattttcgtgtttctaccgtaaagcaaaacgc

SEQ ID NO: 254 - DNA, 2646 bp, Saccharomyces cerevisiae
  CDS (279)..(2519)
cgctgtgattttctacaatcaaacaaccctgtgttttcgctctttttaggacttgtcaagaaaagaatgatgatactgacttttccatttgatattaatttcaactagcggagtttttccagttttcaaagtacaggacaaagtgttgtgtaacccggaccagatttacattggtgtactataatatgtactataacagattggaggtataaacctagagacccttctacaatacacgtacgaggaggtggtcttcgaaacttacagtaccacctgacatgtcgttattagagcaattagcaagaaaaagaatagaaaaatctaaaggccttttaagtgcggaccagtctcatagtacatcgaaaagtgcatccttactagaaagactacataagaatagagaaactaaagataacaatgctgagacaaaaaggaaggatctgaagacgctacttgcaaaagacaaggtaaaaagaagcgactttaccccgaaccagcatagtgtttcattgagtttaaagttgtctgccttaaagaagtcaaatagtgatttggagaaacaaggaaaatcagtgacattagacagcaaagaaaacgaactccctaccaaaaggaaatcgcctgatgataaactcaacttagaagagtcatggaaggctattaaagaaatgaaccattactgtttcttgaaaaacgatccatgcataaatcaaaccgacgattttgcgttcacaaactttatcataaaagataaaaaaaactcgttgagtacatcaataccgctatcgtcgcagaattcatcatttctgtccttaaaaaagcataacaatgagctccttggtatttttgtgccttgtaacctgccgaaaacaactcgtaaagtagccattgagaatttcaatagaccaagtcctgatgatataatacaatcggcccaacttaatgctttcaatgaaaaattagaaaacttaaatatcaaatctgtgcccaaggccgaaaaaaaggaaccaattaaccttcaaacaccacctactgagtcgattgatattcattcattcattgccacccatcctctgaatttgacatgtttgttcctcggtgatacaaacgcaggcaaatccactttgcttggtcatcttttatatgatctaaacgaaatttctatgtcatcaatgagggaactacaaaaaaaaagcagtaatttggatccttcatcttcaaatagttttaaggtcattctagacaataccaaaacagaaagagaaaatggattttccatgtttaagaaagttattcaggtagaaaatgatttactaccgccatcatcaaccttgacgcttatagacactcctggtagtatcaaatacttcaataaagaaactctgaactcaattttgacctttgatcctgaagtttatgtattggttattgattgcaattatgactcgtgggaaaaatcattagatggtccaaataatcagatttatgaaattttaaaagtgatctcttatttgaacaagaattccgcatgcaaaaagcacttgataattcttttgaataaggcagatctaattagttgggataagcaccgactagaaatgattcagtctgagctaaattatgtgttgaaggaaaactttcagtggacagacgcagaattccaatttatcccgtgttcgggtttattaggttcgaatttgaataaaactgaaaacatcacaaaatctaagtataagtcagaatttgactctataaattatgttcccgaatggtatgaaggtccgacatttttttcgcaactatatctattggtagagcataatatgaacaaaatagaaacaactttggaagagccatttgtaggcacaatactgcaatcttctgttcttcaaccgatagcggagataaattacgtgtcactcaaagtcttgatcaacagcggatatattcaatcaggccagacaattgaaattcatacacaatatgaagattttcattactatggtatagtttcaagaatgaagaattcaaaacaaatactggagactaacacaaaaaataatatatcagtcggtttgaaccctgacattttagaggttcttgttaagattcataataccgaagacttcacgaaaaagcaatttcacattcgtaagggtgatataataattcactctagaaagacgaatacactatcaccgaatttaccaaacacactaaagttgttagccttgcgtttaataaaattatcaatacaaacgcacgcgctaagtgatcccgttgacttgggttctgaattgcttctttaccataatttgacgcacaacgcggtaaaattggtgaagattctcgggactaacgacatctcaattaatccaaatcagtcacttattgtcgaagtcgaaattatagaaccagactttgctcttaatgtgattgattccaaatacattaccaacaatattgttttaacatcaatagatcataaggttatcgcagttggcagaattgcatgccagtaatcctacaactaagaaattatactaggcattcatacttattgtttaatatataaaatgaatagtaataagttgatgatagattgatttttttaacccattttacacatatcttatgaaagtgata

SEQ ID NO: 255 - DNA, 6001 bp, Oryza sativa
  CDS (464)..(884),(1132)..(1287),(2103)..(2252),(2353)..(2487),(2957)..(3288),(3399)..(3509),(3596)..(4095),(4350)..(4518),(4783)..(5022),(5097)..(5228),(5315)..(5449)
cacgttgcgaaatgctgactgctgaagctgcttatatatgtgatgattgtatttttctgtgtacgctagcgtcattacgcggaggcccatgtatatgtagttttatgaacttagtattatcaagcaaagaagtacagtgaacttgtccttataagttgcttttatttttatccaagtttgaccaactttataaaaaaatatactagcattttcaacataaaataaacatattatcaaaatatgttcaatgttaaatttaataaaaggaaaaaagtccactttgactcccttaaaagtcacccgaatctaatccgtgaccctcaaccgtaaaaccggataggatgactccccgaactattcaaactagtgcaatttgactccctcagcggttttggatggcggttttgctgatgtggcgttgacgtgccgacccgatggcaaccgtgcggtgccgtaccggcccatgggctcagacgtcgggccaagcacggcacggctgaacgggtcgtgccggcacggcccacgagcgggcgtgccgtgccgttcctgggccggctacagtgctgccgtgctcgggccggcacgccttggcccggcccatttggccaggtatactagtcggctccagtcctcctccccccagcgacctaagccgccaccgccctcgccgcgctaccgccagcgccgcctgccgtccctccgtccctcctcctccggcgggcgcgcggcctgccgtccctcgccgcgcgaccgccagcgccgcctgccgtccgccgtccctcctccgccagcctccgtcgccgcctcccaccagcgccggcccgtcggcgtcccccaggccccagcgcgcgaccaccagagctcgccgctgccggagctcgcccgtcatcgtcgctcaggcccccaggccctcgccggagctcgcccgtcatcgtcgcccaccgagccacttcatacttcaatcaagctatttgttcaaagcctcctttcttgatttgatggtagggttagtgttatttgtaaagagaaaaccagcttccagatctcgaatttgcctcaaacttatcttctcttgtagatctggaagctaggttttctctttacaaataacactattttttcccccattaggtctgccctgtgtcagcaggatgccgcgcaaggttgtctctgggcctgactacgatgatgagtacaatgatgactatgatgagtatgatgaagactatgatgattacggtgggactgggcacagtgacgacattcagcaccctacgaaggagaaaggtattatgtcaaaggtttgaagctagtactagacagtgtacacctcagcatgtaagaatggtgaaatagctattggagtcgcttcatgatgcacacctaacatatctactcgtgtaggttagtcacggcggtgtaggttactaggagccttcacccgttatcataatttgctcagtggtgttaaatgttgttaatgtcattacattgtttccatcctgcattcgtacttgctatcgcatcctctattgcctgattatgcaaataagaatttctagtgcttaattactctaaaacttccaatagcattgcttgttcaaacaaatgcagtgatcgtgtagcttatgtttgccgattacctggtcttgtgataatttccttgcccatttatcccatcatatgcacttcagatatttgttttcttgaaggcattgttattcaacatgcattttttggaatgagtcaaatatcattcatccagtccatcaaaataaaaacttactacaaattaaatctacccaaattgggtgagaatcgaaacatagctggctgccagttagaactaccagtattacctactggttgcttgctgaatcctggtgcatatgcatattattgttttatatatttgacacattttgaaataattcatatgcttatacatttaaccgttgctttccgcataagctccacgcatcgaatgctttgctttgttgttgtacagtgaagtttttttgtgacttactcagcatatcaagctaactgcgtgtagtgcagctccttgatctctaatgttatgtcaccactctattgtgcagagtcatcgaagaagtcctcaagtatggtgcctgtgctttggagatgctccatgtgcatgttcgataatcatgaaagcatggtgtattgtgagatgtgtggggtttttcgagaatcctttatgaaatctgccaaggatggttcaataaaaggtaacatccttcacccattctaattctctttgaatcacaatttgtattctgacaaggaattctaatgtaatcatagtgtactataactattaaattacagtccatgggataccaagtgattttgggacaccttcgatgccgaaatctgattctacaaagatgccagtgaatactcgtactacagactttggtggtgaccctgagataaagaatgctagcatatctcatgagaaaggtactgctggtgcaaatggtagatgctgtacaattttgtgtatgcaactctgttctacctttaaactagcttctcctaccataacaccttattgagttatgaaaaggataattcataattcaccatataaaagaatcacattagctcatcttatgtgcgggaagcagattttgatccttttctttcccaagcaccattgtcacttactgtggctgaacagattgttcccttgcataccactaaaaaatgtttcacttgttggacaacaacaacccacagctcacgtgtcatgccctctgaagtctgaaccaagctacttttgtaagggtgacttatttgtacttgatttgcagatcttcccaaccagttgtatcatctgttggttgataagccttcctgttgaaaaaaaagcctgttagctttgttcttttattgtcaccttaatttaaattattttattattcaacagttggttccacacagtacgcatctgttggtagctcatcaggcgctgggaaaaaggtgaaacacattgcacttcctgaagatgtgcctgtcgagaggacagctcaattgatttctgatcattttcagctgaaggaggaccagagtagtagggctaccagttctgcacagaatgaggatgtggcccagaaactttcttctgacatacagaagctaggtttagaaaagaatgaagtagatactgcaaaaccttatttacctgaagaatataagcctgagaagtggatgtttgctaatgaggaatcaggagtgctgagccaactaaaccttgcaatagtatgctatactcatcttctgttctgaatatggcatatgttccgtaacaattttgttattctaaaagtgctttgtctaaataggttactgtctacgaacaatttgtttaggtaggtcatgttgattctggcaagtcaacactctctgggagactgctacatctgttaggaaggatatcgaaaaaagatatgcacaagaatgagaaggaggctaaagaaaaagtaagtttattattgttgttattgtactatacttgatcctgatgttccattcatattcttgtattatggaaattattttttaccagggaaaaggatcatttgcttatgcgtgggctatggatgaaagcagtgaagaaagagaaagaggtgtgacaatgactgtggctgtggcttatttggagaccaataagtaccgtgtagttttgcttgactctccaggccataaagattttgtaccaaatatgatatctggcgcaacgcaagctgatgcagctattcttgttgttgatgcttgcactggttcatttgaagctggcatggacggtgaaggagggaaaagtgttggccagacaaaagaacatgctcagcttattagaagcttcggcgttgaacagcttattgttgcggtcaacaagatggatgccatcgggtactccaaagaaagattcgagttcatcaaggttcaacttggtagttttctgcgggcatgcaacttcaaagattcatctgttacctggattcctcttagtgctgttgaaaatcagaatttgatcaaaattccttctgatgtccgtttaacttcctggtaagttatgttttgacacactacttccatgccattcgaaacactacattgtgtagaatttttcaacagagatggctgtttcatgcatcttgcaatttctaaccttttcacatggtaatatcgacatattgtagtaagcactcgtgagaatagcattactgatattttgaaatatttgggaccatactgtcttattagaaaaaaaatcatttgtttatctgaagaataggaatcttgaactgatgtcctttcaggtatcaaggattttgtctcttggatgctatagattccttgcagcttccatctcgggatgtttcaaagcccctcattcttcctatctgtgatgttatcaagtctcagtcaacagggcagttggcagcatttggaaaattagagactggagctattcgaattggttcaaaggtacattcctcacaaatcagcagggactattgatacttgtatatttcattgagatgagctccaaatatgaggatagaggaaagattgatcaagagcgtttacattgtgacatttgctagttgcatatttgcatgccaatctttcagtaacagcatgatgtcggaatttggtctttttaaaaaatatatatatttatacttgcttttgtacgcaaatgtcttgacattcctatctgttttgacagcttggaacttgctgttgcaggttttaatttcaccttgtggggaagtggcgacagtgaaatccatcgagcgggattcaaattcatgtgacatagcaagagctggtgataatgtagcggttagtttacagggcatcgatgggagtaagctaatagcaggtgggattctttgcaaccctggtttcccagtgcctgtctctaacttcttggagctaagggttctagtgttggacgtcaccattcctatccttattggctatcaggtaaagatatgaccaaaagctctccttttgattattttcttccctgatgcaatctgataaaaatatgggcctaggtcgagtttcacatacatcatgtgaaggaggctgcgagggttacgaaaatcgtggcattgcttgacaaggctggcaaaccaagcaaaactgcacctcgatttcttaagtcaaagcagaatgcagttgtgcaggtaacaactgatcacagatccttgtgaggagccattgcttccgaagtcatcatttgcgatgttgtgattttcttgatatttgtcaggttaccttagacgctccggtctgtgttgaagaattctccaaatgccgagctcttggcagggcattcttaaggtctggtggaagcacaatcgctgttggagtcgtaacgcgggtactcgggcaagatcagaactgaaagacctccgcccaacatctgaaaatttgaacgtatctgcagccgtgccctgctttggggtccataatattgtagttgactcaaaacggtattgccgatgagaagaagtttggcgacggcatttttcactgtgtgttcgtcgccatttcagaatttaatccgtcactcttttagttatttgtaattttcttatgcctaatgaaaaagggggtttcaggatttcatttttatttagacaggggcacaagaaaagaagacagtgcaacgtactgcatataaaatcgcatccgacctgaccaatgaatactacatttgactgttggtgatagggaggaaattacgacatggccattaatccgttggtgatttaatgatctgatggcactagatctacatctacggagttgctagaaatatggcgctatatgctacagttgatttttttagccacttacacagtagttatatcttatttacaccccacttacatatataattagtatgtaattttcgaatttacatatgtaattttagtacttacatatgtaattt

SEQ ID NO: 256 - DNA, 949 bp, Zea mays
  CDS (36)..(632)
cccagttgcccccaaaccccagccaccagctaccaatggcggccaccgcgatggaccatgacggcggcgacgacgtggtcacaccaggggagcttctcggaaactcattaaccctcgcggccggacgtggcgcctacgccgacggtcgctctgtgcgcgcgtcggtcaccgggcgccgccgcatcgtgccgcccgcacctgcctccgacgaccagagatccacggtggaggtggtggggcacaaggcccatggagctgtgccgcagccgggaagcgtcgtcatcgcccgagtaacaaaggttatggctagaatggcctctgcagatatcatgtgtgttgactcaaaggctatcagagaaaagttcactggcatgataaggcagcaagatgttcgtgcaactgaaattgacaaggtggatatgtaccaatcatatcgtcctggggacattgttaaagctatggttctttctcttggtgatgcaagggcatattacctttccactgcgaaaaatgaacttggagtcgtttcagcacaaagcatagctggtggtacattggttccaatcagttggactgagatgcaatgtgatttgaccggtcaaattgagcaaaggaaagttgcaaaggtggaatagatgtgctgtggccctcctgataaatggtaaacatgtggtggcggtatacaaattgtggaccagtgacaccaggtccttgggcggactacccaattctgcgacgtccaacttcattacagctgcattgagcatgggtttttaaaaccctggctgaatttaactagacatgaatcgtagccatgggtcctgtaacccaaccttgggatctgaatcatagccatgggttctgtaacccagtaaccttgcccttgtgatttgttactctgtgagctaatgacattgcagttttccaccttgtgatttctaaaaaaaaa

SEQ ID NO: 257 - DNA, 1311 bp, Zea mays
  CDS (238)..(1098)
cgacgcgcccaaagctcacgccggacctgctcctctccgacggcggcatcggcttcgtgctccgctactttcccaaggcgttcaagccccgcccccgcccaggccacgaggtggacgacctcgccaacctcatcaagctctacgcggactggcactcccgcctgatcccctactactccttcgaacagttcgtgcgcaaactcgagaaattgggtgccggcaaccgcgtcagggacgatggtgggcctctctgaaggggagaaacacttcatccgcggcggcattgcacaagacgttcgcactgatggacgtaggcggctgcagttccggtccctctccgtccaaaccggagtcattccacaggcgaatggctcagcgcgtgttaggttgggggccactgaaataatcgctagtgtcaaggctgaactaggaaaaccaagcattcttcaccctgacaaaggaaaagttgctatttttgtcgactgtagtccaaccgctgagcctctgtttgagggtagaggctctgaagaattgtctgctgagctctctgtttccctgcaaagatgcttgttgggtggtaaaagcggtgctggtgctgcaattgatctgtcatccctaattgttgttgatggaaaggtctgctgggatctgtacattgatgggcttgtggtcagttctgatggtaatttgctagatgcgctagctgttgcgataaaggttgctttgagtgatacaggtataccaaaagttaatgtttctgttagtgctgcatctgatgaggaacctgaagttgatgtaagtgatgaggaatttctgcagtttgacacatccggtgtgcctgttattattacattaaccaaggtgggtcggcactacatcgttgatgccacctcagaggaagaatcccagatgagttctgcagtgtcggtgtcagtcaacaggcatggccagatatgcgggcttaccaagaggggaggggcagggctggatccaagcgtcatcttcgacatgatatctgtcgccaagcatgtgagccagcagttcatctccctcttggattcagagattgccgccgccgaagctgaagaagaggctcagtgattgatgaaaaggaaaaaggactggttgcgtaaatgctcgtgtgttccaacttcaaccaaatgctgtagaaatcttcaggaacactctatatttacaaagtcattttgctctctatatttacaaagtcattttgctctctatatttacaaagcatgaatgaagatacccaagaacactcccgcacctaaaaaaaaaaaaaaaaaaaaaaaa

SEQ ID NO: 258 - DNA, 1424 bp, Oryza sativa
  CDS (41)..(1261)
ggagagcgcgagcagagcaagcaaccaagcagcagcagcgatggccgccgcagccacgacatcctcccacctgctcctgctctcccgccagcaggcggcggcctcgctccaatgcggcctctccttccggaggcagcccggcaggctcgccggtgggtcgtcggccccgagcgtgcggtgcatggcggccgtcgacacggcctcggcgcccgccgcgacggaggctagcaagaagagcagctacgagatcaccacgctgacgacgtggctgctgaagcaggagcaggccgggaccatcgacggcgagatgaccatcgtgctggccagcatctccacggcgtgcaagcagatcgcctcgctggtgcagcgcgcgcccatctccaacctcaccggcgtccagggcgccgtcaacgtgcagggcgaggaccagaaaaaactcgacgtcgtctccaacgaggtgttctccaactgcctcaaatcgagcgggcgcaccggcgtgatcgcgtcggaggaggaggacgtgccggtggccgtggaggagagctactcgggcaactacatcgtggtgttcgacccgctcgacggctcctccaacatcgacgccgccgtctccaccggctccatcttcggcatctacagccccaacgacgagtgcctagccgacatcgccgacgaccaaaatcttgaccaggtggagcagaggtgcatcgtgagcgtgtgccagccggggagcaacctgctcgccgccggctactgcatgtactcgagctcggtcatcttcgtgctcaccatcgggacaggggtgtacgtgttcacgctggacccgatgtacggcgagttcgtgctgacgcaggagaaggtgcagatccccaaggcaggcaagatctatgccttcaacgagggcaactacgcgctctgggacgacaagctcaagagctacatggacagcctcaaggagcccgggccgtccgggaagccatactccgcgcgctacatcggcagcctcgtcggcgacttccaccgcacgctgctctacggcggcatctacggctaccccagggaccagaagagcaagaacggcaagctgcggctgctgtacgagtgcgcgccgatgagcttcatcgtcgagcaggccggcggcaagggctccgatggccaccagaggatacttgacatcatgcctacggagatccatcagagagtgccgctgtacatcgggagcgtggaggaagtggagaaggtcgagaagttcttggcttgactgcaagtttcatatacgggggtgtttctaaaaaaaaaagtattgtaactaaattataatatatttgtagaaattttcttttctgatggcgaattaattaaacccattgtgaaggatttcatccctactgttgataggtcgaggctccttctcactagtcctg

SEQ ID NO: 259 - DNA, 1501 bp, Escherichia coli
  CDS (208)..(1206)
gtgccacaaattcctaaaatatgaatgcgcatacgtcactatccttttttaatctgccgctcattttacgcatatgtcgggcaagtgagaaacgcatttcaggataatccgtaatttgctggcgcgattcacctgagcgcaacattgagattatttgttaagattgttgcggtcgctttactccataaacattgcagggaaagttttatgaaaacgttaggtgaatttattgtcgaaaagcagcacgagttttctcatgctaccggtgagctcactgctttgctgtcggcaataaaactgggcgccaagattatccatcgcgatatcaacaaagcaggactggttgatatcctgggtgccagcggtgctgagaacgtgcagggcgaggttcagcagaaactcgacttgttcgctaatgaaaaactgaaagccgcactgaaagcacgcgatatcgttgcgggcattgcctctgaagaagaagatgagattgtcgtctttgaaggctgtgaacacgcaaaatacgtggtgctgatggaccccctggatggctcgtccaacatcgatgttaacgtctctgtcggtaccattttctccatctaccgccgcgttacgcctgttggcacgccggtaacggaagaagatttcctccagcctggtaacaaacaggttgcggcaggttacgtggtatacggctcctctaccatgctggtttacaccaccggatgcggtgttcacgcctttacttacgatccttcgctcggcgttttctgcctgtgccaggaacggatgcgcttcccggagaaaggcaaaacctactccatcaacgaaggaaactacattaagtttccgaacggggtgaagaagtacattaaattctgccaggaagaagataaatccaccaaccgcccttatacctcacgttatatcggttcactggtcgcggatttccaccgtaacctgctgaaaggcggtatttatctctacccaagcaccgccagccacccggacggcaaactgcgtttgctgtatgagtgcaacccgatggcattcctggcggaacaagcgggcggtaaagcgagcgatggcaaagagcgtattctggatatcatcccggaaaccctgcaccagcgccgttcattctttgtcggcaacgaccatatggttgaagatgtcgaacgctttatccgtgagttcccggacgcgtaatctcctgcgcctctccacacggagaggcgtttttattgctgcgcaatgttgactcttgtcactggcgaactctgacgattctcccacagcaccgttaatccacgctgtaatgctataaaaataaacaacaaaataccgatggcgattttcgtccaccaggaactcagcgtgccatcaaagtttatgtaagtctgaatcagtccctgaatcgccacgccaaaaagcgtccctaataccgttccaacgccaccgctcaaaagcgtaccgccaattaccactgaggcgatagcatcca

SEQ ID NO: 260 - DNA, 1167 bp, Synechocystis PCC6803
  CDS (1)..(1164)
gtggacagcaccctcggtttagaaattattgaagtcgtagaacaagcggcgatcgcctcggcaaaatggatgggcaaaggtgaaaaaaacaccgctgaccaagtagccgtagaagccatgcgggaacggatgaataaaatccacatgcggggccgcatcgtcattggcgagggggaaagggatgatgcacccatgctctacatcggcgaagaagtaggcatttgcaccagagaagatgccaaatccttctgcaatcccgacgaattggtagaaattgacattgctgttgacccctgtgaaggtaccaacctagtagcctatggtcaaaacggttccatggccgtgttggcaatttctgaaaaaggtggtttgtttgccgctcccgacttctacatgaaaaaactggcggctcccccagcggccaaaggtcatgtggacatcgacaaatcggccaccgaaaacctgaaaatcctctccgattgcctcaaccgcagcattgaagaattggtggtagtggtcatggatcgtccccgccacaaagaattgatccaagaaatccgcaatgccggtgctcgggtacgtctaatcagtgatggagacgtttccgccgccatttcctgtgctttttccggcaccaacatccacgctctgatgggcatcggggctgctcctgaaggggtaatttccgctgctgccatgcgctgtctggggggtcacttccaaggtcagttaatctacgatcccgaagtggttaaaaccggcctaatcggtgaaagtcgggaaggcaacctagagcgtctcgcttccatgggcatcaaaaatcctgaccaggtttataactgcgaagaattggcctgtggcgaaaccgtattatttgccgcctgtggtatcacccctggcactttgatggaaggagtccgcttcttccatggtggggtacggacccaaagcttggttatttctagccagtccagcaccgcccgctttgtagacactgtccatatgaaaggaaagccccaaagtaatccaactgcattaatttccctctcggcaactatccccaagaaggttaaaacctggggaaatacatcgccgtttcccttgtcccctgaagttcagactttgggggacttatgttttggttgggtcatagtaactggggtttga

SEQ ID NO: 261 - DNA, 2001 bp, Synechocystis PCC6803
  CDS (480)..(1523)
ttaatccacgacggtgcccgttgtttggctacgccggatttgtttgatcgttgcacagaggctctccagcattgccaaggattaattgccgccatgccagtgaaggacaccatcaaaatagttaacgctgatggttggatcactgacacccccgatcgccaaggattgtggggagcccaaacgccccagggttttgacgtggccctgctcaaagcctgccatgacaaaggtaaacaggaaggttgggaagtaacggatgatgcggccctgctggaaaaatgtgggcaacccgtgaaaatagtgccaggggaagatactaacttgaaaattaccacccccgtagatttggcgatcgccgaatttattttggggcagaggtcggcaaaatccgcctgaaaataggcaaatttcggggttcggaaagatcaagctaggatggaagggactttgagcctagcaatccaaggagacttttatccatgaccgttagtgagattcatattcctaactctttactagaccgggattgcaccaccctttcacgccacgtactccaacaactgaatagctttggggccgatgcccaggatttgagtgccatcatgaaccgcattgccctagcgggaaaactgattgcccgtcgcctgagtcgagctgggttaatggccgatgtgttgggcttcactggggaaaccaacgtccagggggaatcggtgaaaaaaatggacgtatttgccaatgatgtttttatttctgtctttaagcaaagtggcttggtttgtcgtctggcttcggaggagatggaaaaaccctactatattcctgaaaattgccccattggtcgctatactttgctgtacgaccccattgatggttcctccaacgtggacattaacctcaacgtgggttccatttttgccattcggcaacaggaaggggacgatctagacggcagtgcgtcagatttattggctaacggagacaagcaaattgctgctggttatatcctctacggcccctccaccatcctggtttattccctcggctccggagtgcatagctttatcctcgatcccagtttgggggaatttattttagcccaggaaaatatccgcattcccaaccacggccccatttacagcaccaatgaaggtaacttttggcaatgggatgaagccctgagggattacacccgttacgtccatcgccacgaaggttacactgcccgttatagcggtgctctggtgggggatattcaccggattttgatgcaagggggagtgtttctttatcctggtacggaaaaaaatcccgacggcaaattgcgtttgctctatgaaactgcgccgctggcctttttggtggaacaggctgggggaagggctagtgacggccaaaaacgtttactggacttaattccttctaaattacatcagcgtacccccgccattattggcagcgcagaagatgtgaaattggtggaatctttcatcagcgaccacaaacaacggcagggtaattagtttacttaatcactgcaaatcgtttgaggtctaggaacgtcttttaaaagccccctagccccccaattctggggggaatagtgttcaaagtcccccaaatttgccggagctttagtgaagacatttggagagtggatcatgacttttcaaacatactctaacgccggagattcaactttgttggtaaatctacattgatcaatcctatgcgacagttattgctaatttctgacctggacaatacctgggtcggagatcaacaagccctggaacatttgcaagaatatctaggcgatcgccggggaaatttttatttggcctatgccacggggcgttcctaccattccgcgagggagttgcaaaaacaggtgggactcatggaaccggactattggctcaccgcggtggggagtgaaatttaccatccagaaggcctggaccaacattgggctgattacctctctgagcattggcaacg

SEQ ID NO: 262 - DNA, 1473 bp, Oryza sativa
  CDS (26)..(1315)
ccaagtcgaagcaaaatccctagcgatgtcgtcgccgccgcccgccgccgccgccgcgatggccgtcgacgacgccgacgacgaccagctcgcctccatgtccacggagaacatcgtcagggcaacccgcctcctcgacaacgagacccgcgtcctcaaggatgagctgcagcggacgaaccttgaggtggaatcctacaaggagaagatcaaggagaaccaggagaagatcaaactcaacaagcagctgccttaccttgtcggcaacatcgtcgagatattggaaatgaaccccgaggatgaggctgaagaggatggtgcgaacatcgatctggattcacaaaggaaaggaaaatgcgttgttttgaagacatccacaagacaaacaatattccttcctgtaatcgggcttgttgaccctgaaaagctcaagcctggggatttggttggagtcaacaaagacagctacttgatactagacacgctaccttcagaatatgattcacgggttaaggcaatggaggtagatgaaaagcctacagaggattacaatgacattggtggccttgagaaacagattcaagagcttgttgaagcaatagtattgcccatgactcacaaggaccggtttcagaagttgggaattcgccccccgaaaggtgttcttttgtacggaccacctggcactggaaagaccctaatggctcgtgcatgtgctgcccaaactaacgccacatttctgaaacttgctggtccacagcttgtccagatgttcatcggtgatggtgcaaagcttgtccgtgatgcctttcagcttgcaaaggagaaatccccctgcatcatttttattgatgaaattgacgcaattggaacaaagcgttttgatagtgaagttagtggtgacagagaagtgcagcgcacaatgttggagttgctgaatcagctagatggattcagtagtgacgagaggataaaggtgatagctgcaactaatcgcgcggacattcttgatcctgctttgatgaggtctggtaggctggaccgaaaaattgagttccctcatccatccgaagaagcacgagctagaattttgcaaatccattcaagaaaaatgaatgtaaaccctgatgtcaactttgaagagttggcacgatctacggacgacttcaatggtgcacaactgaaggccgtttgtgtagaagcaggcatgcttgccctacgccgagatgctacagaggtgacacacgaggatttcaatgaagggatcatacaagtgcaagccaaaaagaagtccagtttaaattattacgcttaattcttccgagagagttattaggcctaaggaaacgctccgtccaaaattgtttgtttgtaacactaccgttttatatatttgtgtggttcaagatgtgattgtacgaaacatgtcttgcgctgttccttctctgcttgatatatactgatagaagttga

SEQ ID NO: 263 - DNA, 2877 bp, Saccharomyces cerevisiae
  CDS (883)..(2187)
gaattcttcgaaattgcgggactcgcttacagttttggagaaagcagatagtattgaacacaataaaggaacaactatgtaaccaaccagtgatgagtttaaaaatttagtgcagatggaaaagaaaaaaatgatctagtatactgtctgcaatcaacaaaaactctagccacaacaaactaagcaatcttccccaaatcaacgatattgtacgattaatatatgcaaagaatagtaaggtaagctatagtaaaagggcaagtttaacctcttctgttatttgatctggtgatgagttctgccagaagagcctgtgcaataattttgccaaaaaaaatggcaaatttgctgaaacacgatattcacgtatatagtgatgataataagcatgctatatatcagtagtatgtattttgcagcttctactttctgcaatgtgatgccgttggcattgagattccaacgaatatacacagatgcctgatttgtttgcgattagttactgtaatagagaaaaaaaaatttaaaaaagacgaaagccccaaaagagacgagtgcaattagtggtgatactttatactatgtttaatatatatacctggtttacctagtgagtatgttcgtaaaaaaataacgtcagtaatggttgttggtcggcagccttggcgaattcttttattagcaatggtttaatcatgtagttacccggcaaatatgtggtggcaaaaatgaattaatgtatattttactgaaaaggaccccattaatgaactcttgggtaaaaagggcacatcaggagtttgtctaaaacgtttatacgagtgatttatttgtgcattatagaggtgagaacaaattggaaagttttaattttagtttaagatggccaccttggaagaattggatgctcaaactttaccaggagacgatgaattagatcaagagattttgaatctttcgacgcaggagcttcaaacaagagccaagctcttggacaatgaaattcgtatttttagatctgaattgcaaagactgtcccatgaaaacaacgttatgctcgagaagattaaggacaataaggaaaaaatcaagaataatagacagttaccgtaccttgtggctaacgttgtcgaggtcatggatatgaatgagattgaagacaaagaaaatagtgaatctactacacaaggtggcaatgtcaacttagataacaccgctgttggcaaagctgctgtagtcaagacttcttctagacagactgttttcttgcccatggtcggtttagtagatcctgataaacttaagccaaatgacctggtaggtgtgaataaagactcgtatttgattttggatactttaccctctgaatttgattctcgtgtaaaagctatggaggtagatgaaaaacccacagaaacttactcggacgtgggtgggttggataaacagattgaagagctggtggaggccattgtgttacctatgaaacgtgcagataaattcaaagatatgggaattagagcgcccaagggtgccctaatgtacgggcctccgggtacaggtaaaactttattagctcgtgcttgcgcagctcagacgaatgctacttttttgaagctggcagcacctcaattggtacaaatgtatatcggtgaaggtgctaaactagtgcgcgatgcttttgcactggccaaggaaaaggcaccaactattattttcattgacgaattggatgccattggtactaagagatttgattctgaaaaatccggtgatagggaagtgcaaagaaccatgctggaattattgaatcaattggatggctttagctccgatgatcgtgtcaaagtcttggcggctaccaatagagttgatgttttagatcctgctttgttaagatcaggaagattggatagaaaaattgaattcccactcccatccgaagactcgagagctcaaattttacaaattcattccagaaaaatgaccactgatgatgatattaactggcaagaacttgccaggtctactgatgagtttaatggtgcccagttaaaggcggtaactgtggaggcaggtatgattgccttaaggaatgggcaatcttccgttaaacacgaagatttcgttgagggtataagtgaagttcaagcaagaaaatcgaaatcggtatccttttatgcataaaaataataatattttgatttatcaagccgccattcacatatctacatattagaacaatccttttatttaaagtcgcgtaacttccttattattgatactgtatatggctaattgtatactacttattatttgatgaaaccgaaagcgtagacacaagtatatattcattggcgtttgactttttttttactgtattttcttttcgttggcaccttcgcaatttcaaggatgcattgaaggaaagagaaaagcgtaggagaacaagacgcatcgacggctacgggtgctttgagatttaacttgcagagctccatatacagcacacatctgtagatgatttagtgacatattaataggctgcagaaagggagtaaaacaggtagaagtaagatatcggcaccattctacttttcatataacgattgattaatcttaccaaagcattaaatttaaacaggcttgcagactgaaggagtactcataaagcaaccggaccaggtaatatttgttgtagtattatgggacagtcttcttcaatcagttccagttcagtaacgaagagggttcttcccactcaaaaaaattcacaaatagcaaagatattttggcatatttcaataacaaagcacagcaacaggtcactattccagaattagtcagttttaagggaaatttgcaaattgaagatct

SEQ ID NO: 264 - DNA, 6001 bp, Saccharomyces cerevisiae
  CDS (331)..(5520)
gtttctgggcttactttattcaacaaattattagtagacgtaaacttacttgttgccgcggtacatatttcaccattagagagtttattgtcactacattggccagtcattcaatgcccgcgtgcaaagtgatctaagtcgtttctgattccgaaaaattttgaaaaattttaagatgagatgagctaaacccttctatacattagcagcaactgaagaaagctcagtaaggttcgtctattcatttttatttaaagctattagtatctactactacagtctgaatcaaggaccgtttaatataaaaaacacacctgtactgttgcaaaaatggtagcttccaccaaaagaaagagagatgaagattttccactttcgagggaagactccacaaagcagccctctacctcatcattagtaaggaacactgaggaagtctcttttccaaggggtggtgcgtctgctttgactcctttagaactgaaacaagttgctaacgaagctgcaagtgatgtgttatttggtaatgaaagtgtcaaagcatctgaaccagcaagtagacccttgaaaaagaagaagacaacaaagaaatccacttctaaagattccgaggcctcatcagcaaactctgatgaagctagagctggactaattgaacatgtcaactttaaaacgttgaagaatggctcttctttgcttggtcagatttctgctatcactaaacaagatttatgtataacattcacagacggaatttctggttatgtgaacctaacacatatctcagaagaatttacttcgattttggaagatctggatgaagatatggatagtgatactgatgctgctgatgagaaaaaatccaaagttgaagatgcagaatacgaatcgtccgacgacgaagatgaaaaattagataaatctaatgaattacctaatttaagaaggtactttcacattggtcaatggctaagatgctctgtcatcaagaatacctctttagaaccatcaactaagaaatccaaaaagaagagaatagagttaaccatcgaaccttcatccgtcaacatatacgcagatgaagatttggttaaatccacgtctattcaatgcgcggtcaaatccatcgaggatcacggtgctaccttagatgttggtctgccaggctttacagggttcattgctaagaaggattttggcaattttgaaaaattattgccgggggctgttttcttaggtaatatcaccaaaaaatccgacagatcaattgttgtaaatacagacttttcggacaagaaaaacaaaattactcaaatctcctcaattgatgccattatccctggtcaaatcgtcgacttattgtgtgaatcaatcactaaaaatggtattgccggtaaagtttttgggttagtatccggtgttgtcaacgtatcacatttaagaacattttccgaagaagatttaaagcataaatttgttattggttctagtattagatgccgaattattgcttgtttagaaaacaaaagcggtgacaaggtcttgattttgtcaaaccttccacacattttaaaactagaagacgctttgagatctactgaaggtcttgatgcattccctatcggctacacatttgaatcatgcagcattaaagggcgtgattccgaatatctatacttagcattggatgatgatagattaggtaaagtacattcttcaagagttggtgaaattgaaaattcagaaaatttaagttccagggtccttggttatagccctgttgatgacatttatcaattgtccactgatccaaaatacctaaaattaaagtatctaagaacaaatgatattccaatcggagaattattaccaagttgtgaaataacttccgtctctagttcaggtattgaattgaagatatttaacgggcaatttaaggcttctgttccaccattacacatttcagataccaggctagtttatccagaaaggaagttcaagataggttctaaggttaaaggtagagttatatcagttaattcaagaggtaatgtgcatgtcactttgaaaaaatcattagttaatattgaagacaacgaattaccactggtttccacttatgaaaacgccaaaaatatcaaagaaaaaaatgaaaagactttagcaactattcaagttttcaaaccaaatggttgcatcatttccttttttggtggtttatcgggatttttacctaattctgagatctcagaagtctttgtgaagagaccagaagaacatttaagactcggtcaaacagtaatagtaaaacttcttgacgtcgatgctgacaggaggagaattattgccacatgcaaagtttcaaatgaacaggctgcccaacaaaaagataccattgaaaatattgttccaggcagaacaatcattactgtccatgttatcgaaaaaaccaaagattctgttattgttgaaattcctgatgttggcttgcgtggtgtcatctacgttggtcatctctctgattccagaattgaacaaaatagggctcagttgaaaaagctcagaatcggcactgaactgactggtttggtaattgataaagatacaagaacccgcgttttcaatatgtccctcaaaagttctctgattaaagacgctaaaaaggagactcttccattaacatatgatgatgttaaggatctaaataaagatgtaccaatgcacgcttacattaaatccatttctgataagggtctctttgttgcatttaacggtaagttcattgggttggttttaccaagttacgctgttgatagtagggatattgatatcagcaaggcgttttatattaaccaatccgttaccgtctatttattaagaacagacgacaaaaaccagaaattcctattatctctaaaagctccaaaggtcaaagaagagaagaagaaagttgaatctaatatcgaagatcctgttgattcgtctatcaaaagctgggacgatttgtctattggtagtattgttaaagcaaaaatcaagagcgtcaagaaaaatcaattgaatgttattttagcggcaaatttgcatggcagagtggacattgctgaagtgtttgacacgtatgaagaaattacagataagaaacagccgttgagtaattacaaaaaagacgatgtcatcaaggtaaaaatcataggtaatcacgatgtcaagagccataagttcttgccgattacacacaaaatctcaaaggctagcgttttggaattatccatgaaaccatcagaattaaaatctaaggaagtgcacacaaaaagtcttgaggaaatcaacattgggcaagagttaactggctttgtcaacaattcatcaggtaaccacctatggctaacaatttctccagttttgaaggcgagaatttctctactagatttagctgataacgattcaaatttttcagaaaatattgaatctgttttcccattaggttcagccctccaagtgaaagttgcctctattgaccgcgagcatggctttgtcaatgccattggaaagagtcatgttgacataaatatgtccacaattaaagttggtgatgaattgccaggtcgtgttctaaaaatagctgaaaagtatgttttgttagaccttggtaacaaagtgactggtatttcctttattacggatgcgttaaatgatttctccctaacattgaaggaagcttttgaagacaaaattaacaacgtcattccaactaccgttttatctgttgatgaacagaataagaaaattgaactatcccttcgtcctgctactgcaaaaactcgttcgatcaaatctcatgaagatttgaagcaaggcgagattgtagatggtattgttaagaatgtgaatgacaaaggtatttttgtttacttgagtaggaaagttgaagcctttgtccctgttagtaaactatctgattcttacttgaaggaatggaagaagttttacaagcctatgcaatacgttttgggaaaagtcgttacatgcgatgaagattctcgtatttctctaaccctaagagaatccgaaataaatggtgatttaaaggttctaaagacctattcagacattaaggctggtgatgttttcgagggtacaattaaaagcgtcactgattttggtgttttcgtcaaactagataacactgttaatgttactggtttggcacatattactgaaattgcggacaaaaaacctgaagatctttctgccttgtttggtgttggggacagagtaaaagctattgttttgaaaacaaatccagaaaaaaaacaaatttcattgagcttgaaagcgtctcatttctctaaagaagccgaattggcttctactaccaccaccactactactgtggatcaactggaaaaggaggatgaagatgaagtcatggcagatgctggcttcaacgattccgacagcgaatctgatatcggagaccaaaacaccgaagttgccgataggaagcctgaaacatcttcggatgggctatccttgagtgctggttttgattggactgcttccattttggatcaagcgcaagaagaagaagagtctgaccaagatcaagaagactttactgaaaataagaaacacaagcacaagagaagaaaggaaaatgttgttcaggataagaccattgatatcaacactagggcaccagaatctgttgccgattttgaacgtctacttatcggtaatccaaattcgtccgtagtgtggatgaactatatggctttccaactacaactgagtgagatcgagaaggctcgagagctcgcagaacgtgcgctaaagaccatcaacttcagagaagaagccgagaagttgaatatttggattgcaatgctgaatttagaaaatacttttggtaccgaagaaactttagaagaagtgtttagcagggcttgtcagtatatggactcatatactattcatacaaaactgcttggtatttatgaaataagtgaaaagttcgacaaagcagcagaattattcaaagctacagctaagaaatttggcggcgagaaagtttctatctgggtatcgtggggtgattttttgatcagccacaatgaagagcaagaggcacgtactattttaggtaatgctttgaaggccctaccaaagcgtaatcatatcgaggttgtccgcaagtttgctcaattagaatttgcaaagggtgacccagaaaggggtcggtcattattcgaaggtttggttgctgatgcgccaaagagaattgacctgtggaacgtttacgtagaccaggaagtgaaggcaaaagataagaagaaggtggaagatttatttgagagaataataaccaaaaaaataacaaggaagcaggctaagtttttctttaataaatggttacaatttgaggaatctgaaggtgacgaaaagaccattgaatacgttaaagctaaagctactgagtatgtcgctagccatgaatctcaaaaagcagacgaataattcctgatggatttttaactgtaaagtaatataaatggctaagtttgtaaagtatatttgtaaagtacatagaatgtaaagtttcaagaagcaatttctatcgatcaatttagctttgacggttcgtagagctccttttcttaaagttttagttccgcttctcgcttcttgattacaagatggttccgtgttaacgaagattgagttctatgtattttttatattcacacgctaaaatcacatatttattaaataatgaagtaaattttaaaagcacttttttcaaccagagtgctctgtttgatacatatcaacaaaatccattaaaatatctggtttgaaaggccactccatgaataatttcgttagatatataaactcgtcatttgtcaaatcaatcggacacttttttagcagatctttgtcagtgattctactattaaaatattgttggccaccatgtcccagcgagtccatgaca

SEQ ID NO: 265 - DNA, 6001 bp, Oryza sativa
  CDS (277)..(436),(479)..(1524),(1790)..(2065),(2150)..(2425),(3134)..(3262),(3380)..(3580),(3683)..(3825),(3905)..(4190),(4294)..(4433),(4711)..(4789),(4874)..(4929),(5754)..(5946)
caattctgcatcatttcggggtagtatgtttcattggagtgcttcagcagcttcatccaaactaaactcacaacagctgcctgtgatggaggtgcccatctaccatgatagagttactcctggacctaataatctgccctcctgtgcatataatgtatcctccactcagggtgagttgagatgatgagttacctattttaacctcacaatacaccttaatttttttaattctttattggcttgattttggcaggatataaccaatatgaaaactgtatgggtgctgctaactttgctcattcgttggctgataaacccaagcagatgcctgaaagattagcaaacaccatttttacctcatgtgcatcaactctaccgaaatgtagccctagtattgatgtactgcatattggccatataaaagaacatttctcaggtgagtttacatcccctttcttatgtctgaaacagagttgagctgaagttatttggcatcataaacactatggtcaaattttgccaggtgatgcgtatcaaaatgatagttcacaaccatcaacctctgggagttctagttctttgtcagcagtgtgggatcaaacaacatgttctagtgcaatgagaacacttccgatggattctttctcaacagtgaacggacaaaacctttccacaaacaataaaagtttgtatcccacaaccggtcagggacctttgttgcaacaatacatagaatgtgagatgaagcaagagacgtggagtcggtcactagagcaatcagatcagtcaaacattaccactggaaaccgtgacttgtatcatgctcaaattcatccgtacatcaatggagagcacaaacgggatcgatgcattcaaatgaaagaaaaacttgggcatacttctgatcatgaaggtttctccagggagaaaagctcaaatttaagcaaccactttatgcatcatcagcagggcttcatgactaattatggtgcttgtagccctgtaagcaagacagtggatagagctgaacagacatcaaatagtactgtatcaaagccgacttcacctgcttcagatggatcttctggcaagcattatccagcaaaacgcttgaaagttgatgttccccatcttgtccatgtcaatgaaatggaggcttcaaaggaacaacaacctgctgccaatgagacttatgcatctgctgaaacagtacaatctgaagtcactaattcaccaacaaaatcaccatgttgtacttccttgggggacaacattgcttgcaccgataatgtacatggaatggatatggtcagattgtcggggagtgctgtacaaactgaagaagaatttcgtcgtgaaaatagtgacattgagatgaaggatgcaaaggttgatttattggaccaaacattgtcaggggacagcctgagggcaaggaagagaagaggggcctcagtactttatgcattaacttctgaggagcttaaagatcacttgtgtactctgaaccatgatacttctcaggtgagtgaataacctgttggatcttgtatgatttatctagtattgtaaagcacttgattattattggttgatgtagtctagagaaattttcaaactgagcagctgcaaaattaactaaatattatgtactttcaattgattttcatttggtactaagattttgggttttgttgtcactcaagctttcttgattatattgtacagagtgtgtgcttgttttaagcaaagtttatatctcttaacatgattaacttattttttgtagagcaaagtgccgactgaagagctgctatcagttgaaggcttgcctgatcagaacacatgcaatttatgtgggatggaaagactcctctttgagccccctccacgattttgcgcgctctgttttaaaataattaattctacaggatcctattatgttgaagtggaaaatggaaatgacaaatcttcaatatgtggcagatgccaccatcttagtagtgccaaagccaaatatcagaagagattcagctatgcagagacagatgctgaggcagaatgggtaacatatgcttctcttatttctctctagtcatttggaatcatatacgaattactcattttttgtttaattatgccttttcagtgggtccagtgcgataagtgcaaagcttggcagcatcaaatctgcgcactttttaaccccaaaatcgtggatccagaggctgaatatacttgtgcaaaatgtttcttgaaggaaaaggataatgaagatgttgattcacttgagccatctactattctgggagcacgcgagttaccaagaactagactaagtgatcatattgagcaaaggctttctgagcggcttgtgcaggagcggcaacagagggcaattgcttctggaaaaagtgttgatgaggtagttgtgttatgcttttcttttataccttgtcccgtgtacagaatatgctggtgttgcattctgctaccgttgaacaggctacctcactgttaacctattgaaccacagccaaaagttacatacgtctttccaattgcatttttgtgcttcttgctctatgtgctggattgaaggttacaagtaacatgttagtccttatattatagtcttctaagttgacttagataattcattacatgaatgcatctttactgtcatacgtttctttttattttttacaatgtactgatggcatttcacttaatcatgttcttaatacttctcttggtgcatctagcaatgtgtatttatggcttcaggattgcagctgattacacatgaattcatctttggaacacatgttgatgaccatatatttgttgcgtttcagtatcctttttagtgaaactacttttttcttctttttccttgcattttattggattccgataaaagttggttctgcatattcatctgatttagctgaccaagatgtcatattacaattcatggtcaaacttggaacataaacttgtggatgctttgcttagtcttatctgatcatctatgctgatcttaatgttatttttctgcctctaggatttttattacactgtaatatactggagaaacttattgggcgaacttttatggtccaattattaggtaccaggagttgaaggtcttactgttagagtggtatcttcagctgatagaacactgcaagtccaaccacgtttcaaggatttttttaaaaaagaacaatatcctggggaatttccgtacaaatcaaaggtgattatgtgatacttatactttactaatgctattattataacatccatttaaattatgctttcattatttagtggataatgtgggttaccatttccgtgttttgtgcttgtgcaggccattctcttgtttcaaaagaatgaaggtgtagatgtatgcctgttcgccatgtatgtgcaagagtatggttcagcctgcccatcaccaaatcaaaggcacgtttatcttgcatatattgattctgtcaagtacttcagaccggaaatcaagtcggccagtggagaagctctccgtacctttgtgtatcatgaaattttggtatgagaatgcataatcattaaacacttagtgttcttgatcttgatttcagtttatggatctcatgttggtctgattatcttccaatctgttttcccccagattggctacttggatttctgcaagaaacgagggtttgtaagctgttccatatggacttgcccatctacaaagcgtgacgattatgttttatattgtcatcctacaatacagaagatgccaaagtctgacaagcttcggagctggttggtcttcatcatcttttacagtcaatcctaaaattatttatgggccttcatttgataatcttttcaatatatttaggtaccagaatttggtaaagaaggctgttaaggagggggtagttgtggaacggaatacactctatgacttcttccttcagcccaccaatgaatgcaagaccaatatctcagctgcatggttgccatactgtgataatgatttctggcctggggaagcagagaggctccttgaaaagaaagatgatgacacctcacagaagaaagaaactcaactaggaaggcttctacgggttgccaaacgtgatgaccggaaaggaaacctcgaggatattttacttgtgcataaggttggttgtttaaatcatggtgctccctttcttcagaattttttttcgccgggccttcttcagtattttaggcacttgaccccttaattttcattgttggcagcttggagaaaggttgcgaaccatgaaagaagattttttaatgctttgtctgcagcaattttgcaagcattgccaccatcctattgtatctggtagtagttgggtttgcaccagctgcaaaaacttctttctttgtgaacggtaagcattcagtcatgtaaacttttgtgaccatatagaatgcatttcccatactgaagaactttctggaacagcactaggggaaatgtctgctgttggtaaaaatatataattgcacatggcacttgcatagttcaaccattctagcttatacagtgaccgtttgcctgtcaaattgcaaaatgaatctacattcctactcttttgttgttattcaattactctttgtcgttaaggcacccattatttatgatgccattcttatttgtcctcgtagttgttatgctgaggagctgaatacccctctgaaggacaggcacccagctacaacaaaacaaaagcatgcatttgaaagagtacgtatatgaattcatctatttaaggtagctacaatctgcctgcatggaaatactaaccagattactaatctcctctgacagatagaggaagaacctcttccagaaacggatgatgtagatccaacaatggaaagcaagtactttgacagcagaatagatttcctgaagcattgtcaagacaatcaataccagtttgatactctccggagggcaaaacattccacaatgatgattctttatcatctacatgattcaacttgttcttcttgtcaccgtgccatggatcaatgcttggcatggcggtgcttggtttgcctaggctgcaacttttgtgattcatgctataaacaagacggtgaaagtttgcatattcataagttgaggcagaaaaaagaccatcacgtattgcagaagtacactctacaggtatccttaaattggtagctgaatctttttcatctcctatttgtgtttttcatgaatgtttattatgcactcgaaattaacatcttctgattttttgggaacaactctggggatctgatttttttttggttgtttgctcttcgcatgattatatttggcataaactgtagaatataagtgagttgcactattattatttgttccataattttatccttttggtttaatcttgagcatatgtgtgaagtgtatgcttcactattcttatgtgttgcttcatgttatgttttgtcccagtattttgtgactgcatatccaaattttcaatcaggatgaaaaatattctatgagcttttagattctaatgtggtaattatgtggtttcatcccaaatattattttctgctagtgatatttacggtgcctcttgctaatgaattggatgctttcaaagcaggactaccttgaaggcttggtgcatgcatcaagatgttttgatcgaagttgcacttccaaactttgtttgacgttaaagaaactgttcttccatggtgtacgatgtcatacccgtgcccgtggtggaggaggttgccatatgtgtgtattcatgtggaaactgctgttcacgcactcactgctttgtgacaatgcagactgttcagctcccagatgcaggtaaagtgtgcatcacccgcaatattgatctgccttccggagttgtgaaataattttcacaattttattttttccaattggcttgttaattatctttttcccttttaa

SEQ ID NO: 266 - DNA, 6001 bp, Oryza sativa
  CDS (616)..(903),(1848)..(1940),(2046)..(2165),(2254)..(2355),(2443)..(2693),(2849)..(2994),(3165)..(3363),(3475)..(4141),(4438)..(4770),(5028)..(5309)
ttagcgggttcactgctaatggctatggttgtattaacttatatttttttgttgttaagggtgtaatgccgctgcttgcagccataactaaggctatagggagcgttcttctggccggctacaatggttgcagttgtagctacgcacagtgagtgcggcactattcgtgtcgatcatggtgcagtcacaaaagcaacagccgaaaatgctcattaaatagagccgcttatttttaagttaattagaactgatctaaaagttttacatataaattatattttggttgatactaataaaaacatgatggctggaaacaacaagacataaattttggaggaaaaaccgctgtaaaatacactccgtctcccacaagagaacacgccattttggcaggcgtttccccctccgaactccaccgaggtgatccctcccatggcggccgttagctacgagtagccgcggagacggaagactctcccacctagcaaaaggactagtagcaatccagcgaactcaaagccacccctcctcgtctccctcgcccaagtccacggcgagccgcggcggcggcggcggcggaggaggaggcgcagcgagtgggaggggaggcggaaaatggtggtggtggacgcgtcggagttcggggcggaggggttcgacccgaagcggtggatcaacgcggcgctggacgcgcgccacccgtcggagccgctcgaccgcttcctcgccgacgccgaggagcgcctccgctcggccgccgacgacgccgcggccgcgctcgagcgggacagcgccgacgcgctccgccgcgtcccgctcgcctgccgcgacgcgctccgcctccgcgacgacgccgtctcgctccggtcccatctcgcctccgtcctccagtcgctctcccaggtgcgcccccgctcgcctgctagttggatctggatctcacagttcactcgtgcacaattgtacgtgtatcacgcgaaacccagatcattttggaggattacgaacttgcgataatagttggtgcgaatgagcaaatgttgaaccaatttggcacaataggttttagtttgattcatttatgcgtatgattcagcctctggccgcttttagtaccccccgttttttcacttggatctggatctcacgtactgtatttggtcatgtcaattttatccttgtacgctttgcattgaacagtgcgtacaactagaactgtatttagtcatgtcaattttatcgctgtacgcttttatcaaatgatatgttaatttgatcatctctgttaactgaaactgaagtcagaatttgcgtgggcttggcaaaaccaagctggagctctgttggcaaaatccttgcatgtgtcgggatgttataatgctgtgtacttatgcaatgcagttatgtgcatgtaaactttgagtatgctgtagaggacattcaaatccagcagttcagtgatgcccataaaactatgcctatagtctattataatgggataccgtcacttatatcatttagttcatataggtgataggtcaggatgctacatcaaatcacaagcaaaacattttctcctgtagcatgtacttcttgttacgtgtagcgttatcttctcataacatttagcttgacattttgtagaatacactggaatgaatttgctagcactagaacttttttttttgggtactgagtgattccttctttgtaacggccaatgctgaatactgggtgttaatgaatgaaatatgacatacatatgcatgtatgatcaactaactaggtattcagtcccatctacatttcataaattctgtattactgatgatgatgatttcttcaatcaggctgagggttcatctgcagagtcaataactgcactagcacgaattgatactgtgaaacaacgaatggaagcggcgtatgcaacattacaggtaagttgtatgtggactatggtgcatgttactgaagtaaatgcttcactcacagtggtaggttatcttttaatagatttaacagcttgttggtcggaatgccaggatgcggctggactagctcagttgagccaaagtgttgaggatgtattttctagtggtgatcttccaaaagctgcagaaaccctggcaaccatgagacattgcttgtcggcagttggtgaggtattgtactctctcacacaaacatgcacagtacactgagtttatatgcagaagctatttgttttgcttatataaaagttgctttcaggttgcggagttcgctaatgtgagaaagcagcttgaagtattggaagaacggctagatgacatggttcaacctcgtttggtggatgcactttctaaccgcaaggtttttcttactaatctcatttatatttgttaaacagtagtacaggcatctctatttcatctaaagcctacaaattttggttggaaggtcgatgctgtgcaagatcttcgtggaatactgatacgtattggcagattcaagtcactggaggtgcaatatactaagatccatgtcaagcctctaaagaaactttgggaagattttgatctaaaacagagagctaagcgggtagagatggagaagtatggtggagaaagcataaacagtctctcatttgctagctggcttccaaatttctatgatgagacactactttaccttgaacaagaatggaagtggtatgttcattgtaccctgttgtcttttgttctgaatcagcaatgtttgcccttgtaaacagaagccagtttttggcagcatcttttagctgcattcggacaatatttttgctccaccaaaaattaatggatgttctacaatgctaatgctgaaggtgcctgactgctttccctgaagaatacaaatcactagtcccaaaagtacttgttgaaaccatgagtgagttgaattcaagttttgtctctcgtgtcaacctagcaactggagatgctgttcctgaaactagatctgttgcaaaaggtaatgcataaacttctcgtattatttcatttttgtatgtctatactaatttcatgattgaattacatgttttatttttctctgttcaattaaaaaaggatattacttgtttgccacatatgcgtacttctttcgtaacaataaattgattttatgtcctctgtacccaggtatactagatgttttatcaggtgacttgccaaaaagtaccaaattgcagaataagcatcttggagcactgatcgacctgcacaacatgacgggcacttttgctcggaacatccaacatttattttcagagtcagatcttttagttctgctgaatacattgaaagctatttattccccatatgagacttttaaagcaaggtaaaaaaaaaacttgtgaaaaattctgttgcatgcagttaactgcattggtgagattttttttgttgctattgctgtagtactcagccagtggtgtttcatgctatgtaggtatgggcaaatggagcgtgctttactttctgctgagatggctggtatagatatccgtggggccattgctcgtggtgtgggtgcacagggtatagagctgagtgaaactgttcgtagaatggaggaatccatcccacaaattatagtgcttcttgaagcagctgtcgagagatgcattagtcttactggtggttcagaggcagatgaactggtattggctctagatgacattatgctgcagtacatatcaaacctacaagaaactttaaaatcccttaggattgtatgtggggtggataatactgcacatagtgattcctctaaaaaggaagcaggactagagaaaaaagaagcacaacgattggtcgatgtctctgaagaggaagaatggtctattgtccagggtgctttgcagattcttacagttgctgattgcctaactagcagaacctcagtttttgaagcttctttaagggctactcttgccaggattggaaccaacttttctatttctggttttggttctagcctagataaatcaactgcagcaaatggtgatgagaatgcagaagtgcctatcacagggagggcagcacttgatattgcagctattcgcctcaccgatctaccagacaagtctaagaagctcttcactgtactagaacaggcaagttatatatttttaaattatcttgctagtgtcacaacactagagttatcacatgtttctctgatttgtttgaacagcctgattgcaaacttaggtggtagtattaagctagattatctggttttataggaaattcggagatcttttttagctttccttttctattatgcatttttttaagctactcatatgtggcatagaacctattttttgacctataatttcccaagtatcacaagtaactctttgtttgtcttcatggctaatttaaagataacatttctgttatacagtcaaaagatccaaggttccatgctctacctctgacatcacaaagagttgcggccttctcagacacagtaaatgaactcgtctatgacgtgctcatatctaaagtccgacagcgtctcaatgaggttgctcgcctcccaatttggtcatcggtggaggaaccaggtggccttccccttccaagcttcagtgcctacccgcaggcatatgtgaccagtgttggggagtatctcctaactttaccccagcagttggagccacttgcagaaggtatctcaggcggtgaggctggcaacgaggaggctcagttctttgctactgaatggatatttaaggtaatatattcaaagcattttttttcatcatgctgtgtacattcgcaacataccatcgacaaaaccattcatacttcacactgcgactttcgcaaattccgtacagaagagttgaccatttagaactacatgcattgcaactgaatacaacattacataaaaccccaataatctgaccacaacataaacaccgaacccaaatcttttgatgaattaatctagaactgtctctgatctctgtttccatgatgaaccaggtcgcggaaggcgccaccgcgctgttcatggagcagctgcgagggatccattacatcaccgaccgaggcgcgcagcagctggcggcggacatagagtacctgagcaacgtcctctcggcgctgtccatgccgatcccacccttcctcgccaccttccacacctgcatctccaccccgagagaccaggtccgcgacctcatcaagtctgacggcggcagccagctcgacctccccaccgcccatctggtctgcaagatccggcgcatctcgtcatcagattagtgaaacacaaaggttgccttggtttgttcacgccctgtaacatcgtgtgcatccatccctccaccgttttcccacatcctgagcaaactgatcctgccgacgagtggttgacagtttgacatgtgcttgtaattctttaccattctgcatcttggctacagagttttgcctgtgtaatcgtattccttacagatagagaataatcattagtatatcatcatagaagaaaattctacactatgtgtaaattcgacgaggaaaaaaattcagtcggcaggtcgtgcaagggaaatggacggctctggctttgtttacccaataactaatgttggcagcaacttagtatgtcatattgccatgctctgaccagtgtgtcgccttcacatctccaggattccaagcagtccaatcttgcgtgagccgtgagtccagcagccacgacactacaagccatcggaggaaaaccccactggctacgaaaatggcacgcaaaaaatacgagccatttgccaatttcaccaggacggagagatatttcacttcgtctccatgggctttggcttccgtctaagtgggctcatctcttccttatcgacgctgtgggcacggaggcggccacgtcgcccccatccccctctcctcctcttcctccccaaatccccacgcaactgcgcaccggagagagagagaga

SEQ ID NO: 267 - DNA, 1179 bp, Zea mays
  CDS (309)..(1037)
cccacgcgtccgcccactttcattgagagacgaacacgcgagtagagaatttctcctgcctgctcacgaccgccctctcgccggtcgccggtcgccgctcgcaacgcaagtcggaagaggaatctctccaagctccaatcctccgatcctgccccaacccaagtcccctccaccaggccgcacacctccgccgcccggcgcgaccttgcatccaccagcctgccctctccttcgcgtgaggcggccccggcgaccgcgtcggcagtgcaagaccagaccgaggcttctcccgttggaaggttccagccatggcgagcgccgatctgctgcggaaggaggaggagttctactcctccctctttgattccgcaaaaggcgacggcgtcaagtcgcgctcgcaggtgattgagaggaagattgaatccctcgaggacatggccaccaaggtcagcaaccggagatcaagaagatggttgaacgaccgcttgctgattgagcttgtcccacgccttcatgttgaagaaatcaaaggcctctttgctcctccaccatggggtgaggagctgcccttgtcagcattctgcaggacaagtgttagtgactgggaggccttcaggagcatcgacatggatgctgaggcaagattgatgcaacacatgaaacgatcatccgaaaaacaaaggactcatgtcgacgaagatgaattgattgctctgaatgcttggcgtcgtataggtcgccaaacaagagaagctattaagaaaaaatttctacctgatctacttcaaatatatgaagaacaggttagggccttcattgaaggtactggtgacagcgacgtgcttgtgctgaatgtccaggacccgttccagaggctgcttctgcacggtgtttgtgagttctataacgtaacctcaatgaccacaagcagtgtaagggacgggaagccatggaagagcaccaccatcaagaagaggcatgtcaccggtcttcctccgagaatcacattagttagcttcctgaggatgaggaagaattagtcgtcccagtaacatgtggatgtgagggtcctacactaattcgcctggatgtgtactaaaaagacaaatttgttgctttaggtcgcatctagcatgtaatcaaatgtaaaatatccatgtcaaatgtaaaatacattgc

SEQ ID NO: 268 - DNA, 849 bp, Zea mays
  CDS (114)..(599)
ctcaagtgctcagtgctcaccgctctgcccctgcctcatcacacgcgcgcacggcgcacagataccttttctctcctctcccgtcccactctcctgggcaatcccggcccggcatggcgagcccgtcctcgtccccctcgcggaaggctctgagcaagatcgcctgcagccgcctgcagaaggagctcgcggagtggcaggtcaacccgcccgcgggcttcaagcacagggtcaccgacgacctccagaggtgggtcatcgatgtagcgggggcagcaggcacgctctacactggcgaaacctacaagttgcaggtggatttccccgagcattatccgatggaggcacctcaggttatatttctgcatccagcaccgatgcatccacacatttacagcaatggacacatctgtttagatatactgtatgactcgtggtccccagcgatgactgtcagttctatctgtatcagcatattatctatgctgtccagctcgccagaaaagcaacgcccagctgataatgatcgctatgtcaagaactgtcgcaatgggaggtctccgaaagagaccaggtggtggttccatgatgacaccgtgtgatcggtgttccgattattgttgtcctgtatgcatttagttgccagactatgggagatggacttatttcgaacgacccatttgaccagaaattaacatgctcttgtggtttgtagatgaatgtgcatcagcgtcaggcctgtactttctgattcttacaccgtcgatgatatatagaataatgtttgtatcttgtcaatttacggaacagacatgaaattcaatgcaggtcactggtttctgaaaaaaa

SEQ ID NO: 269 - DNA, 1131 bp, Zea mays
  CDS (90)..(785)
cacgcccgcagcgcctcgcctcggctgctctacctctatcccgcgacccgcgagatcggaatcgcggcgccccgccgccctcctccaaaatggcaccgtctctgctcggggggttcaccaagtcgttggccatgacggtgctctccgagatcggggacaagaccttcttcgccgccgcgattctggctatgcgccatcccaggaaactcgtattggcaggctgtttaactgcactaatagtcatgacagctctatcggcttctctaggttgggttgcaccaaatctgatttcacgtaaatggactcatcatttgaccactctattgttctttctatttggcatttggtcattgtgggaaggcttcaaggaagatggagattcggaagaattggctgaagttgaagcagagctggatgctgcctttaagagtaataaaggtgaatctaaaaataaatttaaggcgaatgatgatatgaagaaacagcaaagaccatttctcatgcagttcttctcaccaatttttctgaaggcattttctattacattctttggtgagtggggtgacaagagccagattgctacaattggcttggctgctgatgaaaacccgttcggtgttgtcctgggtggaatcatagcgcaagcactctgcactactgctgccgttcttggtggaaagagcctagcgtcccagatatctgagaagatggttgaactgtcaagcggagtgctcttcctgctcttcggtatcatgtccttactctctggaccagaaggagaattgtaatccctgcttgagcctttttcagctagctgattaacatggctttctcttcttagacctatcttatttcagtacatgaatgatggcaacgaaagccatccatccatggcgaacaggatggtgatttaacagtttagccgacacgctgtaaacatttcagtcgcccttcaaaaattactacatgttacagaagtctgtagcgattgtatatttgtattctgtcgtgcccagcacgtgaaattttgttatcgcaattacatgcgttaacaaagctttgttcgtgaacctattcaggcaattaatatggggcttatagcaggcctttgtctttaaaaaaaaaaaaaaa

SEQ ID NO: 270 - DNA, 1533 bp, Oryza sativa
  CDS (57)..(1343)
ccaacgcaaaccgcatcgatcaactccttccccaagtcgaagcaaaatccctagcgatgtcgtcgccgccgcccgccgccgccgccgcgatggccgtcgacgacgccgacgacgaccagctcgcctccatgtccacggaggacatcgtcagggcaacccgcctcctcgacaacgagacccgcgtcctcaaggatgagctgcagcggacgaaccttgaggtggaatcctacaaggagaagatcaaggagaaccaggagaagatcaaactcaacaagcagctgccttaccttgtcggcaacatcgtcgagatattggaaatgaaccccgaggatgaggctgaagaggatggtgcgaacatcgatctggattcacaaaggaaaggaaaatgcgttgttttgaagacatccacaagacaaacaatattccttcctgtaatcgggcttgttgaccctgaaaagctcaagcctggggatttggttggagtcaacaaagacagctacttgatactagacacgctaccttcagaatatgattcacgggttaaggcaatggaggtagatgaaaagcctacagaggattacaatgacattggtggccttgagaaacagattcaagagcttgttgaagcaatagtattgcccatgactcacaaggaccggtttcagaagttgggaattcgccccccgaaaggtgttcttttgtacggaccacctggcactggaaagaccctaatggctcgtgcatgtgctgcccaaactaacgccacatttctgaaacttgctggtccacagcttgtccagatgttcatcggtgatggtgcaaagcttgtccgtgatgcctttcagcttgcaaaggagaaatccccctgcatcatttttattgatgaaattgacgcaattggaacaaagcgttttgatagtgaagttagtggtgacagagaagtgcagcgcacaatgttggagttgctgaatcagctagatggattcagtagtgacgagaggataaaggtgatagctgcaactaatcgcgcggacattcttgatcctgctttgatgaggtctggtaggctggaccgaaaaattgagttccctcatccatccgaagaagcacgagctagaattttgcaaatccattcaagaaaaatgaatgtaaaccctgatgtcaactttgaagagttggcacgatctacggacgacttcaatggtgcacaactgaaggccgtttgtgtagaagcaggcatgcttgccctacgccgagatgctacagaggtgacacacgaggatttcaatgaagggatcatacaagtgcaagccaaaaagaagtccagtttaaattattacgcttaattcttccgagagagttattaggcctaaggaaacgctccgtccaaaattgtttgtttgtaacactaccgttttatatatttgtgtggttcaagatgtgattgtacgaaacatgtcttgcgctgttccttctctgcttgatatatactgatagaagttgactcgtcccttgcgtagaaaaaaaaaaaaa

SEQ ID NO: 271 - DNA, 979 bp, Zea mays
  CDS (113)..(853)
caaatctttcagccacccgatccccaaccgcccggcccgacattccctccaaccgccgctgcggctgcgccgcccaccgccgacaggcgcagcagtcaacaggaaccgagccatggcgagcgcggatctgctgcggagggaggaggagttctactcctccctgtttgattccgccaaaggcgatggcgccaggtcgcgctcacagctgatcgagaggaagatcgaggccctggaggacatggccaccagggtcagtaaccggagatcgcggaagtggtttaacgaccgtttgctgattgaactcgtcccgcgtctttacgttgaagagatcaaaggcctattcgctcctccgccgtggggtgagcaagtgcccttgtcagcattctacagggcaaatgttggtgaatgggattccttcaggagcattgacatggatgctgaggcaagattgatgcagcatatgaaaaaatcattggaaaaacccaggaatcatgtcgatgaaggggaatcgattgcgctgaatgcttggcatcgaatagatcgacacactagagaagcaataaagagaaatttccttcctgatctgcttggaatatatgaagaacgcgttagggccttcattgaagacgctagtgacaaagatgctcttgtgctgaatgttcaggacccatttcagagactactgctccacggtgtttgtgagttctacaacgtgagctcgacaaccaccagcagtgtgagagaagatgggaggccttggaaggcaaccaccatcaagaagaggcagggcaccggcgttccctctagaatcacactagttagctttctgagaatgaagaagaatggatcgcagtaacgttagttagcgttcaagaatacaacaaaattgctttagattccgtttaggctgttgcaagacaagtgagtggtcactggcaatgtgttcttatatcgcatcagcctgctggctacggtttgg

SEQ ID NO: 272 - DNA, 2437 bp, Zea mays
  CDS (253)..(2259)
atcgtcgtcgtcgcccgccgctgctaggtttggggtttccggtggccaggacccaagccagctccgtcgggcgccgtggggaactgctgggaggggcggtcgaccggcggtgcctctgcttcgggttctccgtaccggcgtcggaggggatcggatggcataagttggagcaaatctaagtcgttaaattgagaatagtccaaggaaacctaattcatcctattttggcccaagacgacgctttccactagaatgaaggtggcaaatgggttgtctttgaggaaatctaatggtaggtttaaatcaaagcttatgatggaacttgttaaacaatggcgagaacatcaagcaaatatgaggtgcatgaatctatccaagcgtaataacaacatctatgttggggcagaaggagccaacataacttctcccaacgatagcaacatttggccaacgagtgctttagtagcaaagaatagcaacccaagatatgtgctagcctcaaagtgtgcaagccagcctcctacaatgtggctagagaatagcttgaatacttcatcgggtttcaagtgctctaagctctctatcgttaggaatgcacttccttcgaaaacacctaaggcgtctgtctcttggaagtcaaaggatgattcgaatgccataccaagacacctagagcaatctcactgtaaaaagacatctagagcaactcgaactcacttcaaggcgatgccgaatttgattcacaaggcaaagaatgttgatacctcaaatctaaacgatggtacctcgggttcaagttggaggggtcagtcggattcatataagggagaggacataaatatcgggaaggaatgcactaaaacttcagagttgttgaaaagtagagaagcctcaagaaaatcaaacatcctagtggtagatcggaaggatcctaacaaagatgagccagacaaagtgaaaggaatccaagatgaagttatgaccaaagaagagggagtgaaaggccatacctgtgaaggtcgtgcgacgtgttggagttgtcttaagcaggcgaacaccacaaagacaaatgatgctccaaatttaggttcattgttggttggtaacgaacacatgcaaggcctcatgagtaatttgagagataattcatcccatttgtttgaaaagaatcattcaagacaccaaagggatgatccatgtgaatatagagaaacaaacttgaagtttcctaataggatccaatcagttggaggcaatgggaaaaccaatgatgtcacatctaggaggaaacgactcttgttagaagaaaaggctagcgcacacgtgcaaaatgatcttacttatggaccgatgaagaggcggaggtacatagaagccaacgaagatgaagaagagcaaaatgatcttacttatggaccgatgaagaggcggaggtacatagaagccaacgaagatgaagaagattatgtcggcgaccaccatccggtgcatattgaagatgctaccactgaattgacaccgcaggattctatttcaaagcattgcgttgagcgacaatgctattgttgctcaaagcctattgacatacctagatggagtggaacctttaagatagatggaaaggaacacatatcactggctggacatttgtcatccaaatcttgtgagaaagtgtggaaattgtcatcattgccgaaggtggttcaagtgacaaaggttcctagaatggcagtgtggcctaagatatttaaagcatcagaacccagtggtgacaatattggcctatatttcttccctcctgaaatgaggcacgatgaagaactagatcaactagttaatgaagtcatggataaagatttgatcttgcgagctattattggtgaagctgagatgctgatattcccgtctgttctactacctgaaagatatcagacattccaaaccaaacactacctatgggcggccttcaaagcaaaggaggataaaggtgatgcaattgtagaggaggaggttgagaagggaaattgcgtttcaaaccagccagacaaggtacagtctgataatgcttcatttccttcaaaccatggactggaccgtccaagcatggaagctccccctcaaagcagtagcagtgtctttggtattgttgtccgacaagctccaaatcttgaaccagaagtgaagcgatttatccaggagatggaacgcaaaggtgcgttggtaacggttatgaggggggaggcaattggtggagggccatagccaagcaacaccacgaccactatgcattagttgtagagagagtagagagtaaaccatgtcaaactatgctgtagttgtatagagagtctgacacataacgtcgtggacttgagctcttgttcagtttttttgtaaggtacctacaagtttggtcatatgataatttctccggaac

SEQ ID NO: 273 - DNA, 768 bp, Arabidopsis thaliana
  CDS (58)..(654)
attactcatcatcaagttcctactttctctctgacaaacatcacagagtaagtaagaatggtacagacgaagaagttcagaggtgtcaggcaacgccattggggttcttgggtcgctgagattcgtcatcctctcttgaaacggaggatttggctagggacgttcgagaccgcagaggaggcagcaagagcatacgacgaggccgccgttttaatgagcggccgcaacgccaaaaccaactttcccctcaacaacaacaacaccggagaaacttccgagggcaaaaccgatatttcagcttcgtccacaatgtcatcctcaacatcatcttcatcgctctcttccatcctcagcgccaaactgaggaaatgctgcaagtctccttccccatccctcacctgcctccgtcttgacacagccagctcccatatcggcgtctggcagaaacgggccggttcaaagtctgactccagctgggtcatgacggtggagctaggtcccgcaagctcctcccaagagactactagtaaagcttcacaagacgctattcttgctccgaccactgaagttgaaattggtggcagcagagaagaagtattggatgaggaagaaaaggttgctttgcaaatgatagaggagcttctcaatacaaactaaatcttatttgcttatatatatgtacctattttcattgctgatttacagccaaaataatcaattataccgtgtattttatagatgttttatattaaaaggttgttagatata

SEQ ID NO: 274 - DNA, 1201 bp, Oryza sativa
  CDS (201)..(283),(516)..(1161)
gtataggggtggcaggtagtttatattcactggaaaccgagaacttcactcctcccagcactccacactaggaggatgctcactgtctgactgactgactggctgctgctgctgctcattccttctcctactctgcctgcctcctctgctgtgtccttgggagaattcttcagggacagtatccctgcagaggtgagatcatgggacagtcgaagaagaagttccgcggagtcaggcagcgccactggggctcctgggtctccgagatcaggcaccctctcctgtaagtctctatctcactagtgatgatcactagctagctatgttgctctgatgtgttatgccactgtcgtgatagatacattttgatggatagctagtggttctggtttgttgttgctttctttctttttttctttctctttcatggtatgttagtagctaactcaaggtgcttgggtgcgtgcatgcatgaatgatggatgatgttttttttgctacgtgcgttgtggcagtaagaggagggtgtggctgggtacctttgagacggcggaggaggcggcgcgggcgtacgacgaggccgccatcctgatgagcggccgcaacgccaagaccaacttcccagtcgcgaggaacgccacgggggagctcacaccggcggctgcggtggcagggcgggatggccgtgtcggcggcggcagcggcagctcgtcctcaatgacggccaacggcggcgggaacagcctgtctcagatcctcagcgccaagctccgcaagtgctgcaagacgccgtcgccgtcgctcacctgcctccgccttgacccggagaagtcccacattggcgtctggcagaagcgcgccggcgcacgcgctgactccagctgggtcatgaccgtcgagctcaacaaggacacggccgtgtcgtcggctgcgacggtggcagcagcaacagcagtgtcgtccagcgaccagccgactccgagtgacagcacagtcacaacgacgtccacgtccaccacgggctcgccgtcgccaccacctccggcaatggacgacgaggagaggatcgcgctgcagatgatcgaggagctgctgggcaggagcggcccgggctcgccgtcacatgggctgctgcacggtggtgaaggtagcctcgtcatctgaattccggaagaacaggaaagaaattgaaaatgcaagg

SEQ ID NO: 275 - DNA, 2284 bp, Zea mays
  CDS (385)..(1722)
ggatctttcgctttccttaccccgttagcgttcctgcttgatacactacgactgcagattctttggcagaccgctaccaagtgcaagtgtgcaacgcacacacatcactcacagtctcacggtgtctctgtgcgcgcgcgtgggacacaggagggagagagacacagagaagggggcgggacgatcagctctagctcagctggtatcgtctaaactgcataaaaggggagggaaaaaaagttgcaatgatgcatcccggcgcatagatagagagagagagagaagagagagccccgactcgagagccaagaacgccgtgtgttgtgtttgtgtgcatctatctccgtacacgcacgctcgtacgcaccagctagcacgaccgccatggccgccaccaggagagccttcttccacagcgccgtcgacggcattgcgcgcgccgggccgggggaggccgagcggctgccggcgccgccgcaggtcgggcgaccggtggaaggcgccagcagcatggtcttgggcttccccgtgccgcggcccacgatgccggaccgccggccggccgccgtcacccagcagttctttccgcccactactacggccgcgcagcaggcgacgatggaggagcaatgccacgtgcccgccggtagcgcggcggagcagtgggtccggtcgtcggcgtccaggaagagccggcgcggcccgcggtcacggagctcgcagtaccgcggcgtcaccttctaccgccgcaccggccgctgggagtcccacatctgggactgtgggaaacaggtgtacttgggtggattcgacacggcgcaggccgctgcgagggcctacgaccaagccgcgatcaagttccgcggcctgaacgcggacatcaacttcaccctggacgactacaaggacgagatgaagaagatgaaggacttgagcaaggaggagttcgtgttggtgctccggcggcagggcgccggcttcgtcaggggcagctccaggttccggggagtcacccagcacaagtgcggcaagtgggaggccaggatcggccagctcatgggcaagaagtatgtgtacctgggcctgtatgacacagagacggaggctgcccaggcatatgacaaggctgccatcaagtgctacggcaaggaggcggtgaccaacttcgatgcccagagctacgacaaggagctccagtcgcagccctgggacggcgagctggatctcgagctcagtctgggctgcgccagcagcgatccgtccacggtcgccgtcgaggcgttcagccccgcgacgagcagcagtagccgcaagcagaggacgatgacgctgacgctcggtctgccggaggaggaggagacgggcgccggctaccctcaccctgctgccggcatgttcgggcgcccggctgatggccacgtccacgtagcaccgccgccacaccggcaatggcagcagcagcagcagggacagcacgcagctccagatgcggcgcctgagcgacgagcggcagagccagcagatcggcagcggtggggccggggcgcgcgctggcccatcgccagcgccagcggcattaactgggcctgggcgccgccgtacgccaccgcccgcgccggcaccgacgacgacgacgccagcagcgccgccgctgcagcatcatcaggattcccactgtggcagctgggtgcggcgtcgtccaggtccagctggcccagctgctgagcctttcctgtcgtcccgcgccaccaacagtgacgctgctgggccacgtactgacggcgactggtgacctgctggaaccgccgccggcctgtttcccttttctaggtaaaagcagtggcagaggggcgagctagcgacagcgtgcctcgtcatccatcgtccctgcgccgtggctggcggggtgggaaaaagtctgagcagttttgagcgtccggaggagctcgagatttcctccctcgaatagtcacttggggtggccactagttattatttctttccttccccctcgttgattctgctacccattatagcctctgtatctagctacatgcatgatgctgctctagcgctgttggacgttgatggcacggtgtacggatatggacagggttcgtgtgaccccatgtccactgctaggcctgtttccaaatggagtatttctgcagtaccatggcttatagaaatgccgagtattttaaaccattaggtgcttggttactttcccaaaaactaggttttcaaagctatggtataatgaataccacggtatatatttttc

SEQ ID NO: 276 - DNA, 1966 bp, Oryza sativa
  CDS (372)..(1082),(1176)..(1946)
agaaaaccttgtgtcccccccatgatgcagaaatctaataagagcagcccaacgcttccggttggtggcggtagaccggcctctttaaactaccccatccgccccagatttatcaattactcctcgtcatctcgtctcgtctccgccaccgtgcgcgcgtcccctatattagaccccccaaccgggcaccggacacaccatcaccaacacaccactgcaaacccatccgcctccgcaccgcatcgcacctacaaattgtgcacgctgcaccgctcaaaaaaaagaagaaactaaagtcgtacgtaggacgcggcgtgcgagcgttggtgcggtgcgcggcggcgcgcggggaagtagtgagagcatcgatcatgccgggggcggcggggtactccgggtcggtgaagctgaagtacgtgaagctggggtaccagtatctggtgaaccacttcctgacgctgctgctggtgccggtgatggcggcgacggcgctggagctggcgcggatggggcccggtgagctgctgtcgctgtggcggtcgctgcagctcgacctcgtccacatcctctgctcggtgttcctcgtcgtgttcgtcggcacggtgtacttcatgtcgcggccaaggccggtgtacctcgtcgactactcctgctacaagccgccgcccagctgccgggtgccgttcgccacgttcatggagcacacgcgcctcatcaccgacgacgagaagagcgtgcggttccagaccaggatcctcgagcggtcggggctcggggaggagacctgcctcccgccggccaaccactacatcccgcctaacccgtccatggaggcgtcgcgcgccgaggcccagctcgtaatcttctccgccatcgacgacctcgtccgccgcaccggactcaagcccaaggacatcgacatcctcgtcgtcaactgcagtctcttctccccgacaccgtcgctctccgccatgatcatcaacaagtacaagctccgcagcaacatccgcagcttcaacctgtccggcatgggctgcagcgccggcctcatctccctcgacctcgcccgcgacatgctccaggtaagtactagccagctctttgatgttactactgtttagctaactaactaatcaggtgagccattaacgagcgacatggacggacacgcgcaggtgcatcccaactcgaacgcgctggtggtgtcgacggagatcatcacaccaaacttctactggggaacccggcgggacatgatgctgcccaactgcctgttccggatgggcgcggcggcgatcctgctgtcgaacaggaggagggaggcgaggagggccaagtacaggctgatgcacgtggtccgcacgcacaagggcgccgacgaccgcgcgtaccggtgcgtgtacgaggaggaggacgagcaggggcactcggggatctcgctgtccaaggagctgatggccatcgccggcgacgcgctcaagtcgaacatcaccaccatcggcccgctggtgctgcccatgtcggagcagctgctcttcttcttccgcctcgtcggccgcaagctcatcaacaagaagtggaagccgtacatcccggacttcaagctggcgttcgagcacttctgcatccacgccgggggacgcgccgtgatcgacgagctgcagaagaacctggacctgtccgcgcagcacgtggaggcgtcccgcatgacgctgcaccggttcggcaacacgtcgagcagctcgctctggtacgagctcgcctacatcgaggccaaggggcgcatgcgccgcggcgaccgcgtctggcagatcggcttcggcagcggattcaagtgcaacagcgccgtctggaagtgcctccgcacagtcaagacgcccgccgacgggccgtgggacgactgcatccaccgctaccccgtcgacatcccggaggtcgtcaagctgtgatcgaatccatggtagcc

SEQ ID NO: 277 - DNA, 961 bp, Zea mays
  CDS (41)..(679)
gccccagcagagctcatctctgcctcctgtgtccttctccatgacagagaatctccactccaggaaaatggtacagccaaagaagtttcgtggagtccggcagcgccactggggctcctgggtctctgagatcaggcatcccctccttaagaggagggtctggctgggtacctttgagacggctgaggaggcagcgagagcatatgatgaggctgctgtgctgatgagcggacgcaacgccaagaccaacttcccaatccaaagaagcagcacaggggagcctaccccagctgcgggaagggacgcccgcagcaacttcagcagcggctcctctaccaccaacctgtcccagattctcagtgcgaagctccgcaaatgctgcaaggcgccatcaccgtccctgacctgtctccgccttgaccctgagaagtcccacattggtgtttggcagaagcgtgcaggagcccgtgctgactccaactgggtcatgacagtggagctcaacaaagatgcagcatccactgatgctgcatcacagtccacatcagcaacaactgctccaccagccacgccgatggatgaggaggagaggatcgcactgcaaatgatcgaagagttgctgagcagcagcagcccagcttcaccctcaaacggagatgaccaaggtcgcttcatcatctgaaaagcatggatcaaacagcacaagtcaccatcccagatcagagtttcgctaggtcggttggtacacaagcagttcaggttgcttcagtaatatagatatatgtctattactaaatccaacttacaagaactataaagtttgcaattgtgtgcagttctatgtacgtgaaaagctctacatacacatgttcctatcaagatactttgttacacatcaatgtcagtgatataattgcttataaaagaaataaatagattatgattgtgttactgctaaaaa

SEQ ID NO: 278 - DNA, 2864 bp, Zea mays
  CDS (441)..(2390)
ccacgcgtccgcccacgcgtccgcccacgcgtccggtctttggtcccggagggaaaaggacaaatcactcacacagagggaacaaaagggcacaggaatcgcgacagcgtgggaggcgtacggcgcaccgcccggccgccggatctgcgccggcgacgcgcccggacgtcggatctacgccgccgcaggaggagggaggcggcgctctggccgttccttgcccgcgagcgcccagatccgtcccgccgccggatatatatatcaatcaatgcccctgtgatatcgagcttcagttgatgcagtggtgaaaacatcttctcgaaaaactgctggctgcaagttgcaaaagtttgtctttcccttgttgtgttgttgcttccttctctggtggagtacacgggagaagtttgcagatacaggcagctcctttcaaatctcctatgtccagggatttggactgtcctgttcagacacagatggctgtggcagtcctggaccggagctttagcagcgaatatcctggaggtagcagaattgaggggaggcaactgagctggaagagagtatttgtccaaactgacaatggttctgtccttggcatcgagctggagagaggagaaaacgtacaaactgtgaaaaagaagctccagatagccctcaatgtgcccactgatgagagctcattgacctttggtgacctagttctgaataatgatcttagcagcattcgcaatgactcacccttgtttctcaaaaggaatcagattcaccggagcaattccacaccttgcctctcacctacaggtaagaatgttttgcaaagagaccggagtggacccattgaaatccttggctgttcaagtccttcatctcggatgaagcagcttgctaaggatgtcattaaagccataatgaatgatgttgacccagtcgctgttaacagtgggatgggtggtgcctactacttcaagaacatttggggagagcgtgtggcaattgtcaagccaactgatgaggaaccatttgctccaaataatccaaaaggttttgtggggaaagctctgggacagccgggcctgaaaaggtctgtacgggttggggagacaggcttcagagaggttgctgcttacctcctcgactatggtcactttgcaaatgttcctcccaccatgctggtcaagataacacacacaatcttcaatgtgaacgactgtgttggctgcaaaagtaaagtgttctgcaacaaatcagaggctgtgagcaagattgcatcgctgcaggagttcattcctcatgatttcgatgccagtgaccatgggacctcaagcttccctgtatctgcagtgcataggattggcatccttgacattagaatcttcaacactgacaggcatgctggaaatcttctggtcaagaagcttggtcctggcgccgacaattttggagagcagacagaactcattcctattgaccatggtctctgtcttccagaatgcctagaagacccatacttcgagtggatccactggccgcaggcatctgttcctttctccgaggaggagcttgagtacattgcaagacttgatcctgtaaaagatgcagaaatgctacgcatggagctacccatgatacgagacgcatgtctcagggtgctggtgctatcaacagtatttctcaaggaagctgcagcgtctggcctctgcctctcggagattggagacatgatgagcaggcagttcactgcgaaggaggaggaaccgagtcagcttgagctgctctgcatggaggcaaggaagtgggttgaggaaagagagtcctttcttcccaacgaagccggagttgaagatgacgatgatgacttcacccagttccttatcgacggcgaggatgattatccggatgccttggaaccatcagctttctgcaagtttggtagcatgaaggcaagttctaggaatccactgtccaagctagatgagcgtgacgaggaagacggagacgggaccgaggaggacgacgacgacgacatcttgaccggtgcattgcctcagaggatctcgtctatctccaagctgtcgtcatccatgaaggggcttggcttcattgggaaacccaagccctaccgcacgtgccttcggaagggtaaagcgacaggcagaactaagtacaccggcaaagccagcgagcatcagtccggcagcaggagcgccaacgagctgctcccgcccagcgccagtttcgtgaagctgtcggacatgagccctaaacagtggagcgcattcctcgacaagttccaggagctgctcccaggtgccctgagcgcccggaagcacgctgccggtgtcgtcggccagcgctcgatgccgaggctgggcacgtcttgccagttttgagagtagcagaagagaagccaccgaacccaaggtatgacgaacgcgcttctgttcgagctctggtgtgcagcagccaagcaggtacggagtattatatatgcttgtagtaggtgtctggagccggtggtggtagagagggtccgagaataagatcatccatggcatgtgagatgaggttgcgggagaaggaagggggttgtgtgtgtttgtgcatagtgtttcgcataagaggtccgttgttctttttttcttcttctctgtatatagttaagtactcctactgctactgcatcgcagcaccgggcacgggctgggatctcggccgttgttatctgaacgatggtggtgagtgtgctggcgtcgcctgctctctgctctgtctttgccgctgtaccattttggaggcgcttaccatattatgaactttgaactatgatatgatgttcgctaaaaaaaaaaaaaaaaaaaaag

SEQ ID NO: 279 - DNA, 1602 bp, Zea mays
  CDS (55)..(1470)
ccacgcgtccgctcctcctaactacgcctgcctgtttcctcccccgcaggattgatgagctcggcgagggtgagaggccccttcacgccgccgcagtggatcgagctggagcaccaggccctgatctacaagtacctgtccgcgaacagccccgtacctcacagcctcctcgtccccatcaggaggagcgggagcctcgcatcgtctccctacccgcctccctacttcggcacgagcacattcgggtggggctccttccagctgggctactccggcaatgcggatctggagcctgggcggtgccgccggacggacggcaagaagtggcggtgctccagggacgcggtcgccgaccagaagtactgcgagcgacacatgaaccggggacgccatcgttcaagaaagcatgtggaagaccagcctggccatgccgcgaaagccatgtccgcggtggccgtggcggctgctgctgctgctgctacccagcatgctgctgctctggccggcgccggagctactgctgctgctggcctcgctgtcaatcggcaccggcagccggggaagagctatgccacgggtgcgactgatccatgctctctgcaatatagcagggaactggcgaacaaactgtcgaacgagagcgaaaacatgcaggactctgacaatgtctcgatgctgacttccatgaacacaggaaacactgcaggcagcgtgtttccgttctcgaaacagaacactgctcttttcgaagtgagcagctcaaggccagagtttggtcttgttccatcggattcactgacgagttcacctcatagttccttgaagagtgtcaaaaatctgctcagctcacggagtctgagtgagcaccagagctccgcctccctgcaacactttgtggactggcccaggacgccacctgcccagggaggtctttcatggcccgaggcagaggacatgcccagagctcagaggtcccagctctcagtatccgctccaatggcatcctccgagctatcatcggcctccacatctcccatccacgaccacgagaagctgattctgtcacctctcaagctgggccgcgagtataccccatctggcgtcgtcagcgctgcagcgaacagatacgaggttagccagctagaagcgacctgggcgacgatgttccgcgactcttcgacgggcggcccgttgggggaggttctggccaagaacaacagcaacgcggaagcaagaggttgcccgtcggcggcgccacctctaaccgactactactgctgggattcaggccacggcatgcagtcgtcccccgtgggagttctgcagaggacgaccgccttcggatcggtctccagcagcacgggcagcagccctagggtcgagaaccacggcgcctgctgcgatggtaccagcaacctgatggatgatctcggttcagttgtagtgagacatcccagcatccgcctcttgtgagcccgctgggttctggccatggaaaaagcgtgagggggagcatttaccacgtagtttgtcatttgagactgatctcctgtttctgtcacctgagttcttcttttgttgcccttaaaaaaaaaaaaaaag

SEQ ID NO: 280 - DNA, 1891 bp, Oryza sativa
  CDS (193)..(1380)
ttacaaaaccccagccaccgagagctctcccgctccactcgccgcacaccaccaccctcacccctccccccatccgcgtgatctcccgagcagctagagcgcgcgcccgcggcgcctgtactgcgagaccgcttcgctcgcttccggtcggtgaagaggcggtcggtcgcagctgaagtagttgttgcagagatgatgatgatgagcggtcgcccgagcggcggcgccggcggaggtcggtacccgttcacggcgtcgcagtggcaggagctggagcaccaggcgctcatctacaagtacatggcgtccgggactcccatcccctccgacctcatcctccccctccgccgcagcttcctcctcgactccgccctcgccacctccccttccctcgccttccctccccaaccttcactggggtggggttgctttggcatggggtttgggcggaaggcggaggacccggagccagggcgatgccggcgtacggacggcaagaagtggcggtgctccaaggaggcgtacccggactccaagtactgcgagaagcacatgcaccgtggcaagaaccgttcaagaaagcctgtggaaatgtccttggccacgccgccgccgccgtcctcctccgccacctccgccgcgtcgaactcctccgccggcgtcgcccccaccaccaccaccacctcctccccggcgccctcctacagccgcccggcgccgcacgacgcggcgccgtaccaggcgctctacggcgggccctacgccgcggccaccgcgcgcacccccgccgccgcggcgtaccacgcgcaggtgagcccgttccacctccacatcgacaccacccacccgcacccgccgccgtcctactactccatggaccacaaggagtacgcgtacgggcacgccaccaaggaggtgcacggcgagcacgccttcttctccgatggcaccgagagggagcaccaccacgccgccgccgggcacggccagtggcagttcaagcagctcggcatggagcccaagcagagcaccacgcctctcttcccgggcgccggctacggccacaccgcggcgtcgccgtacgccattgatctttcaaaagaggacgacgatgagaaagagaggcggcaacagcagcagcagcagcagcagcactgcttcctcctgggcgccgacctccgtctggagaagccggcgggccacgaccacgcggcggcggcgcagaaacctctccgccacttcttcgacgagtggccgcatgagaagaacagcaagggctcctggatggggctcgaaggcgagacgcagctgtccatgtccatccccatggccgccaacgacctcccgatcaccaccacctcccgctaccacaatgatgaataatctcttgaagaagccaagaagtgatcaacacgcggaagaaatcaacagcttctttcacggcgtgcgagctgcatgctcatgctccaggatcgatcgatcgatcattgcatctccaaactaatcacgcttcgatctttcaggacttcatcaatgacaggccgaaacctcctacgagttctctgatgatattcttattttttttcccacttcttttcgttgagctttttgtaatgttgcttcgagtgttactcctacattttctccgaaatggcctcagaatgatgcggtcgggctgattaattaggttagactcttcctgaaccaactaggaatagattttctgcctggttcctgtcagtccttgtaatatctgcagcagcttgtgagccaagcgtgttcgcttttgtgaacgccctttttcttctttccgattcctctgcctgtgatagtactcgctccgcgaaaaaaaaaaagagcaaaccgtggattcttgtgtcaaaaaaaaaaa

SEQ ID NO: 281 - DNA, 1505 bp, Zea mays
  CDS (96)..(1202)
atcacctccgccgctctccaccatgaatcccatccaccagcacggcatcgtacccaatccttcgtgactgttgcctccgcgcatctccgggagcaatggaaggaggccgagatgtgttcttaggtgcggcggcaagggcgccgccgccgccgccgtcttgcccgtttcacggatccgctaccgccacccgctccggtggagcgcagatgctcagcttctcctccaatggcgtagcagggttgggtctgtgctcaggtgccagcaagatgcagggtgtgttgtcgagggtgaggaggcccttcactccgacgcagtggatggagctggagcaccaggccctgatctacaagcacttcgctgtgaatgcccctgtgccgtccagcttgctcctccctatcaaaagaagcctcaatccatggagcagccttggctccagctcattgggatgggcaccatttcgttccggctctgctgatgcagaaccaggaagatgccgccgcacagatggcaagaagtggcggtgctctagagatgctgtcggggaccaaaaatactgtgagcgacacataaaacgtggttgccaccgttcaagaaagcatgtggaaggccgaaaggcaacaccgaccactgcagatccaaccatggctgtttctggtggttcattgttgcacagccatgctgttgcttggcagcagcagggcaaaagctcagctgctaatgtgactgatccattctcactagggtccaacaggaatttgctggataagcagaatctaggtgaccagttctctgtatccacttccatggactcctttgacttctcatcatcacattcttccccaaaccaagccaaagttgcattttcaccggtggccatgcagcacgaacatgatcagctgtatcttgtgcatggagccggcagctcagcagaaaacgttaacaagtctcaggatggtcagctgctagtctcgagggaaacaattgacgacggacctctgggcgaggtgttcaagggcaagagttgccagtcagcatccgcagacatcttaactgaccattggacttcgactcgtgacttgcgtcctccaaccggagtcctacaaatgtctagcagcaacacagtgccagcagagaatcacacgagtaacagtagctatctcatggcgaggatggcgaattctcagaccgtcccaacactccactgagtgttcatcaggctggtctttgttgggaccacaaaataactgaagccatgttgatgtcctgagtttgctgatactaggttttcagtcgagtcttgtaactcctgttttagagctgttatatgttcacgtcatgtcgcctttcattttcggttcattcagatgggtgttctaataatttctttccttcttacctgtgaaggatttgagttccaatctgagacgtgggtttgttctaacttggaggtatttatgaatattaggcacttctgatttccattgaagcgagatttctttaaaaaa

SEQ ID NO: 282 - DNA, 2363 bp, Zea mays
  CDS (253)..(2115)
cccacgcgtccgcgccaggcgcagatggaatgagcgaccgggctctgctccgccgctagcctgccgccgcaccgcgccgtcgatcgccgcgccatgaacggtccccgcggctaccccctttctccaccggcaccttacccccgtatggcgtgatccaatgatagcaccaagagcgcaccttcccctctccctgacggcgtcgtcctccccgcacggcggcgcgcgcacccgcaccaagaagaggaagaaaccatgtcccccaacctggacagcgccatcaagagccaggtgccggcgctgctcctgaggcgtctcttcggcgcgtcccggcgggacgaggccaagcagctccagcggaccccggcgccggtggggaggcggagggtgttcgtgcagacggagaccggctgcgtgctcggcatggacctggaccgcggggacaacgcgcacaccgtcaagcgccggctgcagctcgcgttcaacatgcccaccggcgggacctcgctcaccttcggcgatcgcgtcctggagaacgacctctccttcttacgcccggactcgccgctactgctcacccggaacagcatcaaccggagctgctccaccccgtgcctctgccccgtctccaaggacttcgagcacaaggactgcagcggactggttgagatgctcggctgctccagcagctgtgcccgggtgaagcgcctcgtggacgacgtggtgactgccatcaggagcggcgtggatccggtccccattagcagcggccttggtggctcgtactacttcaggaacgtcttgggcgacagggttgctattgtgaagccgacggacgaggagccctttgcgccaaacaatcccaaggggttcgtcgggagggcgctcggtcagccgggcctcaagagatctgtgcgagtgggagagacggggtttagggaggttgcggcgttcctgttggaccatgacaacttcgccaacgttcctgccacggctctggtgaagataacacactccattttcaacataaactgcccggtaaatggaggaaacctggcaccggctcatgaccagcaacagcaagttaacagcaagattgcttcgttccagcagttcatagcccatgacttcgacgccagcgaccatggcacgtcaagcttccctgtcgctgctgttcataggatcggcatactagatatccggattttcaacactgacaggcacgccggcaatgtgctggtgaggaagcttaacggtggcacaggccgctttggttgccagacagagctgttcccaattgatcatggcatgtgcttgccggagaacttggaggacccttacttcgagtggatccattgggctcaggcttctattccgttctctgaggaagagctcgagtacatcagaaatcttgatccaaggaaagatgtgcagatgctgcgccgggaacttccgatgatacgtgaggcctgcctacatgtactggccctgtgcacaatcttccttaaggaggctgcagctttcggactctgcttggccgagataggcgagatgatgaccagggagttcagagggatggaggaggaaccaagccagctggagcttatgtgtatggaggccaggaagagagtagcagagtgggagcccttctctgccacagctgaacatggagaagataccgatttccagttctcggtggatatgctaggagaatacagtgatgtagtgcgatcaccaaggttcaatggctcaggttccaaagtgtccagtttcagaagccctttgtctaagctcgtcgagagcgtcgacgagggcagtgatggccatgaagatcaaaacgagtctgatcgagtcttgtatgctggatggaatacatctagcgttcctagcaaagctatgggccatagtggcaatgcctcaaaaagtgcaatgaacaggagtgccgatgaacaacttccatcaagtatgtgttttgtcaggctgtcggatatgagtgcagatgagtgggatgtattcctcgaaaaattccaggagctgctgaaagagacactgcacgagagcgcaagggcagcagcaggtcaaaggatgaagcagcggctaggcacttcatgcaagttttgagcagggcaatagcgcatcagagaagaaaaaatatgcagtgctacttgtattgcttgcttatggagtgagtacaggatgaagatatcatcgtatgcggcaccttcaaccttgtgcaacgatctaggttgcagcagccatgtccagcaggtagataggaccacaagcatatgtagtgacggtgtggagaactgctacgcgtgtttattagctatatgtttacgaaggggaatgcttaataataaaaa

SEQ ID NO: 283 - DNA, 900 bp, Nostoc PCC7120
  CDS (49)..(843)
gtttgcaacgtttagtttaatatcgcagtatgtttcaaccgcagggaaatgagtagtactttatatcgaaggcaactactgaaattattgggtatgagtgtcttgggaacctcattttctagttgtgtcacatctccagctagggcaaaaacggtaaactggggatatatcggcaaagtaggcccagagcattggggtgagctttcccctgactttgccctttgccaaataggcagaaaacaaacgccgattgatttgcagattgcagatgtgaaagatgtccacagcagcagtcaagatttgttagttaccaattatcagccaacggcattacacctaatcaacaacggtaaaacagtccaagtcaactatcaaccaggcagttatctcaagtatgctcaccaaaaatttgagctgcttcagtttcactttcatcacttcagcgaacatcgggttgatgggaaattatatgatatggaactccatttagttcaccggagtaaatctggcgacttagccgttatgggtattttcttgcaagcaggagcatttaacccgacgctgcaaattatctgggatgccacacctcaaaaccaaggaacagacaaaagaatagaggatataaatatagacgcttcccaatttctcccagcacaacacagattttttacttattctggctctctgacaaccccaccctgttcagaaaatgttctctggtgcgtaatggcgacacctatcgaagcctctcctgcacagatagctaagtttagtcaaatgtttccccaaaacgcacgtccagtgcaacctctcaacgatcgcctagttatcgaagccatttaaaatttttctgtcaacttccccggattttgtgttgctatgtcatactaagagatgaga

SEQ ID NO: 284 - DNA, 2025 bp, Chlamydomonas reinhardtii
  CDS (156)..(1232)
cataacttcaaagcctaaacgtctattcctcgtgccaaggcactttctccggaagcgcacccacctctccgcgccgctcgccttcacgcgtgctctcagctcaacaccactgtaactcaggccttgacgggcttgttttatcaaaaccagcaagaatgtcatccgacgctatgactatcaacgagtcgctgatggaggtggagcacactcccgccgtccacaagcgcattctggatatcctgcccggcatttcaggcggtgtggcccgtgtcatgatcggccagccctttgacaccatcaaggtgcggctgcaagtgctgggtcagggcactgccctggcggccaagctgcctccgtcggaggtgtacaaggactcgatggactgcatccgcaagatggtcaagagcgagggcccgctgtccttctacaagggcaccgtcgcgcccctggtcggcaacatggtcctgctgggcatccacttccccgtcttctcggccgtgcgaaagcagctggagggtgatgaccactactccaacttctcccacgccaacgtcctgctgtcgggcgcggctgccggtgccgccggttctctgatctctgcccccgtggagctggtccgcaccaagatgcagatgcagcgccgcgccgctctggctggcacggtggccgcaggcgccgccgcctcggctggcgccgaggagttctacaagggctcgctggactgcttcaagcaggtcatgtccaagcacggcatcaagggcctgtaccgtggtttcacctccaccatcctgcgtgacatgcagggctacgcctggttcttcctgggctacgaggccactgtcaaccacttcctgcagaacgccggccccggtgtgcacaccaaggccgacctcaactacctgcaggtcatggccgccggcgtggtggcgggcttcggcctgtggggctccatgttccccatcgacaccatcaagtccaagctgcaggccgactccttcgccaagccccagtactcgtccacgatggactgcctcaagaaggtgctggcgagcgagggccaggcgggtctgtggcgcggcttctccgccgccatgtaccgtgccatccccgtcaacgccggcatcttcctggcggtggagggcacgcgccagggcatcaagtggtacgaggagaacgtggagcacatctacggcggcgtgatcggccccgccacgcccaccgccgcgcagtaaatgtggccgcggctgcggctacgtgcttgagcgcccgcgtgtgctctatctagctgctgcaacagctgctgttgcgcacgcggcgcaaggcgcaacctcctggcatgacaacatggctcaaaaggtgtcacgtgtgtgtgtgtgtgtgtatgtttgtgtgtgcgtgtggagagtctggcataggtagatgtggtcgttagctttctgcttcgttccccatcgtgaggcgcatacatgcggcaacaagccagtggatgcactctgggcagaacgtgcgtgtgtgctcgtttttcctagcttagtggtggcagcagcggcaacagaaagaggtaggcagaagcaggagcggtcgagggaacaggacagctgctgaatacaaaggcgtcagacctgaacgtaattttgtgcgggcaccataccccgcttacggtccaagggcatgatgcctttttgatgcacacatcacccctccccgcgcatgtatgttaaatgatgattttgactgctgtttttgagagcggaacaaggggaactgcagtactggctcggacatgagaggagaggccggcgagagaggctcatgacaaaaagtggaatgggcttgcagatgtatatagcagggcaaactggcaaaaggagcgatacctttcgtaagcacagggctgaggtgcatggtcgtggaaggtcacgggagttgagccgctacaccggctgtcagtgctggtctgtttctccatcgggaaacgcgggtcaatatgtaatcgtgatgggtttcaaaaaaaaaaaaaaaaaa

SEQ ID NO: 285 - DNA, 1801 bp, Synechococcus PCC7942
  CDS (271)..(1674)
ctggtgcaagccctcgcgactgcgttacctgctggtgcagaggtctttctgcaatccgatgtgctggaagtgcaggcagagatgtgcgaacactttgcggcggaaccccgctttcagcgcacctgcttggactggctgccggaaaatccgctgcccgtcccgaccgagcgcgaaattgccgttcaaaacaaacagttgccagtctaccgtgctctcttcattcggcagccagcggactaagctcttaaggcaagcgttgacgcgatcgcgatgactgtctggcaaactctgacttttgcccattaccaaccccaacagtggggccacagcagtttcttgcatcggctgtttggcagcctgcgagcttggcgggcctccagccagctgttggtttggtctgaggcactgggtggcttcttgcttgctgtcgtctacggttcggctccgtttgtgcccagttccgccctagggttggggctagccgcgatcgcggcctattgggccctgctctcgctgacagatatcgatctgcggcaagcaacccccattcactggctggtgctgctctactggggcgtcgatgccctagcaacgggactctcacccgtacgcgctgcagctttagttgggctagccaaactgacgctctacctgttggtttttgccctagcggctcgggttctccgcaatccccgtctgcgatcgctgctgttctcggtcgtcgtgatcacatcgctttttgtcagtgtctacggcctcaaccaatggatctacggcgttgaagagctggcgacttgggtggatcgcaactcggttgccgacttcacctcacgggtttacagctatctgggcaaccccaacctgctggctgcttatctggtgccgacgactgccttttctgcagcagcgatcggggtgtggcgcggctggctccccaagctgctggcgatcgctgcgacaggtgcgagcagcttatgtctgatcctcacctacagtcgcggtggctggctgggttttgtcgccatgatttttgtctgggcgttattagggctctactggtttcaaccccgtctacccgcaccctggcgacgctggctattcccagtcgtattgggtggactagtcgcggtgctcttggtggcggtgcttggacttgagccgttgcgcgtgcgcgtgttgagcatctttgtggggcgtgaagacagcagcaacaacttccggatcaatgtctggctggcggtgctgcagatgattcaagatcggccttggctgggcatcggccccggcaataccgcctttaacctggtttatcccctctatcaacaggcgcgctttacggcgttgagcgcctactccgtcccgctggaagtcgcggttgagggcggactactgggcttgacggccttcgcttggctgctgctggtcacggcggtgacggcggtgcggcaggtgagccgactgcggcgcgatcgcaatccccaagccttttggttgatggctagcttggccggtttggcaggaatgctgggtcacggtctgtttgataccgtgctctatcgaccggaagccagtacgctctggtggctctgtattggagcgatcgcgagtttctggcagccccaaccttccaagcaactccctccagaagccgagcattcagacgaaaaaatgtagcgggctccccaacaaattcctgtgcacccgactggatccaccacctaaactggatcccaaaggtatccggtggatctagggtcataacgaactccgaccgcgatcgcgtccgcgaactgaacctcca

SEQ ID NO: 286 - DNA, 1383 bp, Chlamydomonas reinhardtii
  CDS (62)..(994)
cttttgtagacccacttgtcagtgggcactgcccctagaagcggcttcttgaccagagaagatgcgctcagccgttctacaacgcggccaggcgcggcgagtgtcttgccgggttcgggcggatggttcgggcgtggattcgctgccctcgaccagcgccagcagcagcgcacgccctctcattgatcgccgtcagctcctgaccggtgctgctgcgtcggtcataaccttcgttggctgcccttgccccctgtgcaagcctggggaggcaaaggccgcagcttggaactatggcgaagttgcgggtccgccaacctggaagggtgtgtgtgcgacgggcaagcgccagtcgcccatcaacatcccgttgaacacatcggcgccgaaggtcgacgcggagatgggcgaattcgatttcgcctacggcagcttcgagaagtgcgacgtgctgaacacgggacacggcaccatgcaggtgaacttccccgctggcaacctggcgttcattggcaacatggagctggagctgctgcagttccacttccacgcgccctcggagcacgccatggatggccgccgttacgccatggaggcgcatctggtgcacaagaataaaagcaccggcaacctagctgtgctgggcattatgctggagcccggcggcctgatcaagaacccggcgctgtccactgctctggaggtggcgcccgaggtgcccctggccaagaagccctcgcccaagggcatcaaccccgtcatgctgctgcccaagaagagcaaggccgggacacggccgttcgtgcactaccctggctcgcttaccacgcccccgtgttcggagggggtggactggtttgtgttcatgcagcccatcaaggtgcccgacagccagatcctggacttcatgcgcttcgtgggcgacaacaagacatacgccaccaacacgcggccactgcagctgctcaacagccgcctggtcgaatacgagctgtgagcggacacgagtgtgctagggtcagtgagcagcgtgtgaacatgaagattacaagtttgctgacagagagcgggcggagtgcccatgcatcgcatcgtaacagcccgcgaagtacgacttaacatgacataaaagtgcaatgcgcatattgactggtttggcccacggtggggaaggcgtacgcgcggttccatcaagcagcctttggggaggcatcgccttgcacgcacttgccgtatgtaggcgtgctggtgaatgaggtatggggcgagagacccgcgaactaaacttaagtagattacccatgtatcctttatttggcttgcgtgccctctcaattggggcaccgatgcaggggctggaaggccccgtgtaacacatgacactca

SEQ ID NO: 287 - DNA, 2345 bp, Zea mays
  CDS (113)..(1906)
gcagagcagcgcaggcgccctgcacctccactctgcagctctgctccccctccctctctcccgctcctcctccttttccttctccagctcggccgcctcagcccgcgccgcgatgtcagaggaggacgaggaccagccgccggccaagcgacccagcccgtcgccgcccgcggaccaggtgctcgacaacgtgctcgagacggtgctccagttcctggacgccccgcgggacaggagcgccgcctccctcgtctgccgctcctggcacagcgccgagtccgccacccgcgagtccgtcgccgtccgcaacctcctcgccgtgtcggccacccgcaccgcgcgccgcttccccaacgcgcggagcctcctcctcaagggccgcccgcgcttcgccgacttcaacctcctcccgcacggatgggacgcctccgccttccgcccctgggccgccgccgtcgccgccggggccttccccgcgctcacctcgctctacctcaagcgcatccccgtcaccgacgccgacctggacctcctctcccgctccctcccggcgtcattccgtgacctcaccctgcacctttgcgacggcttcacctcgcgcgggctcgcgtccatcgcctcccattgcaggggcctgcgagtgctcgacgtggtggagtgcgacatggccgaggagcaggaggttgtggactgggtggccgcgtttccgcaggagccctctaacctcgagtcgctctccttcgagtgttacgagccgcctgtggccttcgcggcgctcgaggcgctcgtggagcggtccccgcgcctcagacgcctgggggtcaatctgcacgtctcgctcggccagctgtgccgcctcatggcgcacgcgccgcgcttgtcgcacctgggcaccgggtcgttccggccggcggatggcggcgaggaggggacaggattcggggaggttgtctctgcattcgtggccgctgggcgagcgcgcacgcttgtttccctctccggcttccgtgacctcgcgcaagagtacctgccgaccatcgccgtggtgtgcgcccacttgaagagccttgacttaagctactccgcggtcaccccgaatcagattctgatgttcattgggcaatgctacaaccttgagacactatgggtacttgactcggtgcgcgacgaagggctcgacgccgtgggaatttcctgcaagaagctccagtctcttcgtgtgctcccgttgaatgcacatgaggacgccgacgagttggtgtcagaggttggccttaccgccatctcacggggctgccctgctctccgttcgatactatatttttgccagaccatgaccaacgctgctgttgtggacatgtcgcggaactgcccggagctgaaggtattccggttatgtataatgggacggcaccagccggaccatgcgactggggagcctatggatgaaggattcggtgccatcgttcagaattgcagcaagcttaccaggctatccacgtccgggcaacttactgatcgggcatttgagtacattggcaggcatggcaagtccctgcggacgctctccgtagcatttgctggaaacagtgatgtggcgctgcaatacatcctccagggctgtccaaagctagagaagcttgagataagggactgccctttcggtgacgctggcctcttcgccgggatgcaccatttctacaacatgcggttcgtctggatgtcaggctgcaacctgaccctgcaagggtgcaaggaggtggctcaggtgctgccacggatggtggtggagttgataaatggccagtctgatgagaacgaaaggaatgaaagcgtggacatcttatacatgtatcggtcactcgatggtccaagggaggatgttccaccgttcgtgaagatcctgtgaagctgcgcttctgcggagatggctgggtatcgctatcagtgtagtattcaggctgctgcacttgatatgctggctgagtgcagatcatttaacggaatatatatgtaagttgttgagctgcagatgtggtacatttttatctcttagaaagatttcgaagcactgtactggagcggggcgggcgggggtatcatgtagtaggagttcatcagatgtggtacatttttatctagtaggagttcatcagtgtatccaaagcgttcacggcaggaggactaagtgcagcagagcaggcttcttcgagggggcctcatggctgcctcagttttgtttgctgctctggagggggctctggtttgaggaccatattttctgtgccggtgcaaccaccatgttttccttcaaattttcgaaatgaaacctgtcatatcagact

SEQ ID NO: 288 - DNA, 2082 bp, Glycine max
  CDS (123)..(1304)
attcggctcgaggtagtagagcactgaattggatatgtgtctatcacctaatctaagtcatcgtgtggtggtggttttggtcggtggcaaagagagaagaaacaaagcctgttcttcttaccatgtcggatcatcttccgcgcgaagtgctaaccgaaatcctctcccggttaccggtcagatccctactgagattccggtcaacgtccaagtcatggaagtccttaatcgacagccagcacttgaactggcttcatctgactagatccctgaccttagcctccaacacgagcctcatcctccgtgtggactccgatctataccagaccaatttcccaaccctagaccctcccgtatcccttaaccaccctctcatgtgctacagcaacagcataaccctcctcggttcctgcaacggccttctctgtatatccaacgtcgccgacgacatcgccttttggaacccctccctccgccaacaccgtattcttccttacctccctgtcccccgccgccgtcaccccgacacgacgctctttgccgcccgcgtctgcggcttcggcttcgaccataaaactcgcgactacaagctcgtccgcatctcttatttcgtcgaccttcatgaccgctccttcgactcccaggtcaagctctacacgctccgcgccaacgcctggaagacacttcccagcttgccctacgcgctctgctgcgcccgtaccatgggcgtcttcgtcggaaactccctccactgggtcgtcacgcgcaaactcgaacccgaccaacccgatctcatcatcgccttcgatctcacccacgacatcttccgcgagctcccgcttcctgacaccggaggtgtcgacggcgggttcgagatcgacctggcgctgttaggtggttccctctgcatgaccgtgaactttcacaaaacgagaatcgacgtttgggtgatgagggagtataaccgtagagacagttggtgtaaggtgttcacgctcgaggagtcgcgtgagatgagatcgttgaaatgcgtgaggccgttgggctactcgagcgatgggaacaaggttctgttggaacacgacaggaagaggctgttttggtatgacctggaaaagaaagaggttgcccttgttaaaattcagggtttgcctaatttaaatgaagccatgatttgtttgggaaccctcgtaccaccatacttcttacctcgtcaaatttgtaggaagccgcgtgctttaggatgcgaacgtcccaggaagacgagggatgacttcctgtcgcagggtttcaaattgacattatgaggaagtctaagaagaagaagcaatggtacatgggggtagctgaaactggctcggcgggtttgttttgcagttgattcaagccaaagggaggttgaggaaaagtaagaaaatgttgcttccgttacaatgactgtaatgtatagttaaattaatactatcagctacatattttactttgggatgtgtgccacgtttgacgaactctgaaacaaacatgctcttattggttacttgctgagttatctgactctgatgatgaaattcgtggccctggttcacaggacgagttaaattgatcaagagcaggaacagagacaccgttttgcctgttaagatataagactctttccttgtacagtttttgcaccttttgttttcttagcgatttaggggcgaacaaagccccccaccaaagtgaaagaaagggctgcagacctgccattcagaatgttgaagaaggaaacaatgactgaagaacagataccaaatatacaaatgctgctttcctcacttattaacagtctccaattactaagatcccgtaagacactcgctttccgcaatagaaaaaaaatggcctatatggttttgtctaagcttggattgcctcagtggtttggttgtaaagaagtgtcatgtatgtacgtgtgttaatctggttgtaccagcaaactgtaattaaatttttgcagttaacttgacatgaaatattgttgtttttgtttattggtaggtggactttgcaaattgaaaaaaaaaaaaaaaaaaaaaaagg

SEQ ID NO: 289 - DNA, 2101 bp, Glycine max
  CDS (228)..(1916)
acagagcgcagaaaataaaataggtgaaatgaatatcgatttcaattccgccactgaatttcgaaaccaaaaaaccattccaacgaagaagatgaacctcgaagaagagggttagttacttctgagtgagtgagtgagttagtggttcctctgaggaacggtgaggaccttcaatttctcaagttctcaaccgttcgttttctctttcgttcccctaaccgccgtggatgggacaatctgtttcctccgccgccgtcgctagccgtcgcgagagggaccaaggccaccgctccgtcaactcttccaagaccagattcaccgcctcggtttcgccgatggccggttattcctccggcgccgccgaagaaggcgaaaaccatcgcgtggaggccgttgccgatgaatccaccgactacatctccgatctcccgaacgagtgcctggcttcggtgtttcagtttctcagctccgccgatcggagccgctgttcgctcgtttgccggcggtggctccagatcgaaggacagagccgccacaggctttctctgaacgccgaactggatctgtttccggcgattccgtcgctgttctctcggttcgattcggtgacgaagctcgcgctgaagtgcgaccgcagatccgtgagcatacgcgacgacgcgctcgtgctgatctcgcagcggtgccctaacctcacgcgcctgaagcttcgcgcgtgtcgcgagctcaccgacgcaggaatggaagcgttcgcgaagaactgcaagggattgaagaagctctcgtgtggatcgtgcacgtttggatccaaaggcatgaacgcggtgctcgacaactgcgccgcgctggaggagctctccgtgaagcgcctccgtggaatcgctgacactgcagcggcggagccgatcggtcccggcgtggctgcggcgtcgctcaaaactgtttgcctgaaggagctatacaacggacagtgtttcggaacgctgattctcggcgcgaagaatctgaaaaccttgaagcttttccggtgctccggcgattgggaccggctctttcaattattggtggatcgagtcacgaaaattgttgaggttcacctcgaaaggcttcagattagcgacgttggattgcaagcgatagcgaattattcgagtttggagattttgcatcttgttaagacacctgaatgttctgatattggacttgttgctattgcagacaggtgcaagcttttgaggaagcttcatattgatggatggaaggcgaatcgaattggggacgaaggtttgatagctgttgcaaaaggttgccctaatttgcttgaattagtgctaattggggttaaccctactaaggcgagtttggaaatgttggcgtctaattgccagaatctcgagcggttggctttgtgtggaagtgattcggttggtgatcctgagatatcttgcattgctgcaaagtgtgtggctttgaagaaactgtgtattaagagttgtcccgtttccgatcaagggatggaggcattggggaatgggtgtccgaatttggtgaaagtgaaggttaagaagtgtaaaggggttacccctgagggtggtgattggttgaggaggactagagggtcagttgctgttaatttagatactggtgaggcagagcttcaggaagccagtgctagtgatggaggggcacaggacaatggtgtagagttccctcaaatgcctgcccaaatcgctgctgcatcgagcagcactcggtctagttcgtcgaggtttgcgcttatgtctgcgaggatttcagcggctgcattgaggagcactcggtctggttcgtcgaggttagggcttttgcctacgaggatttcagcggctagcacttttaggagatggtctggtggtagcactagtgcacgccatggttagggacagggccaaagcaaaacctgagtctttgaccatttttcattgtttttggttgtcgtatcatttgatttttatatttcttgtacttaaatttgaaatttatgccgtgtgatgtttattgcctttggaattgaagcttcacggttgcaattgacaatcgcatttttttcctttctaaaaaa

SEQ ID NO: 290 - DNA, 2255 bp, Zea mays
  CDS (519)..(1958)
gcaaggcaagtagccgctgcgcggtgctgccacctgacctgactgccgtcccggtccccggtccatccgaacgccgttacggggccgcccaccgcgacggaacggaaaggtgcggtcaacccaccccgtcccagtcccatcaccgccgggggccgggtggataaacaaacccagcggccccggccccctgtccgcctcattcccttccttcctttgctcctcccctgcctcgcctctctcccctctcctcgcctccagctcctgctcggcccgctcgcgtccagctgcgcgcgcgcctgcggtggccgtgaaggacagcccgagggacgcgccgggtgcactgatctgggggccgcgtgtccccggtggtggggcgaggcggcgccggcttccaggaatgggcagcttgtagtggctgtttcttttgcatatgcgctttctattgttgttgtcatttcaaaggaggccatagtctcctggattttgtatgccttgttatctggaattggtgaccatagatgtcatttcgtagcatagtccgtgatgttagggatggcttcggcagcttgtcaaggagaagctttgaggtgaccctcgcaagcatttatggccttactgggcatcacaaagggaagacccagagctcatcacatgtgctcgacgactcaccttccataattcgtgaaagtcgatgggcgaatctacctcctgaactcatccgtgatatcatacggagactggaggctgatgagagcacctggccagcgcggaagcacgtcgtttgcttcgcagctgtttgtaggacatggagagaaatgtgtaaagagattgtgttgagcccggagttttgtggcaagctcaccttccctgtgtctctaaaacagcctggtcctcgagatggaaatacaatggtccagtgttttataaagaggaataagtcaaaatccacttaccatctctacctgtgccttagcaatgttgttacttcagaaagtgggaaattcctcttatcagctaaacgacaccgcaaaaccacatgcaccgagtacactatatcaatggattctggcaacatctcaagatcaaaaagaacctacattggaaaaataaggtctaacttccttggcacaagatttttaatttatgatacacaaccgccctataatggggctgtagttcctcctgccggaaggacaagcaggaggttcaactccacaaaagtctctccaaagctgccttcagtcagttacaacatcgcacaggtatcgtatgagttaaatgtccttggcacgagaggtcctaggcggatgcgttgcatcatgcactccatacctgcatcatcagtggagccaggtggcacagtgcctggacagccagagcagattgtacctcgagccctggaggattcattccgcagcacggcttccttctcgcagtcgttccgtagcactgcctcattctccaagtccatcatggactcatccatggatttcaatagcgctcgcttctctgacatcgctggcagcagcgctcgcttcacgggcgttcctggtagcagcgctcgcttcgcgggcgttcctggcagcagcgctcgcttctcgggcattgctggcgccagactggacaacgacgaggagagtgaaaccaaggagaggccactggtgcttcgtaataagccgcctaggtggcacgaacagctgcagtgttggtgcctcaacttccgtggccgtgtgacaattgcctcggtgaagaacttccagctgatcgccgcggctaccccgccaccggcaggtgcgccaaccccctctcagcctgccccgtcagatcccgacaaggtgattctccagtttggcaaagtggcaagggatatgttcacgatggactatcgctaccctctctcggctttccaggcctttgccatttgtctgagtagctttgatacaaagttagcctgtgaataaatggagaagaacaaaggtaaaggagaacatcaggttgcttgcattaggccatcagtgtacctctttccatctggctctcgtgttgccttggttgtatttgtgcttaatgtagccatgaatttggtggcccatatatggacgcatgtgttgttgttggccctctcccttagaagtgattaaaagttgcatttggaccacatgttacccgatctgtaatatacttgcagtggcatcgcatgccgcgtgataacaaagttcccgttcgtgattggacttgtatggttaaaaaaaaaa

SEQ ID NO: 291 - DNA, 1562 bp, Zea mays
  CDS (517)..(1269)
attcggctcgaggtgggattgtgggaagatgcctcgggatggcgcgcaggcggcgccgccaccggagcgcggcgagatggacgaggtggtagaggcggacccggatacggaggcggaggatcaggaggagaggtgggcgaggctgctgccggagctgctctccgacgtggtgcggcgcgtcgaggcgtccggcggcgagcggtggccggcgcggaaggacgtcgtctcctgcgcctgcgtgtgccgccggtggcgggaggccgccgtctccgtcgtgcgtccgccggcggagtccggcaagatcaccttcccctcctcgctcaagcaggtcgattgcatggcttcccttatatggcgtcatcagcggttttgatacgtaccggccattcagatatttaggatatagtttgagaagtttcctggccaattcagtgtcgtagtgttttttatttgacatctgtgtacctaaatcttacaccatttctcaaaacacagccagggccaagggagagaccaatgcagtgctttatcaagaggaataagaacaactctacattctacctctaccttggcttcacaagttcacctgtggataaagggaagtttctcatggctgctagaagatttaggcgtggtccccataccgagtacattatatctcttgatgcagaagacttatcacaagggagcaatgcatacatggggaaactgagatctgatttctgggggacaaacttcaaaatatatgatagcaagccaccatatgatggtgctaaagcatcaagtagtcgatctagtcgtcgtttcggaagcagaaggattagtccccaggtatcggctggcaattatgaagttggacaggtttcatacaaatacaacttgctcaaatccagaggccccaggagaatgtattgcactctcgaatgcccttcagcccaagagacttgggaaaactcactcaagacaaagttcaggcgccccctgggccccacaactttacgaaataaagcaccccgctggcatgagcacctgcaatgctggtgcttaaacttccatgggcgggtaacagttgcatcagtcaagaatttccagcttgtggctgctgccgaccccagtgagcctactaccaacgtggatgatgaaacggttctgctgcagtttggtaaggtcgatagcgatatgttcacaatggattaccggcaaccactctccgcgtttcaagcatttgccatcagcctcagcagctttgggaccaagctagcctgtgaatagcgatgcagtttgatgctcttcgtgtggctatatggtttgtgttggtggttgcttgcttgtttcttgttgttacgatgtgatccgttcttcgttttagttgagtatttatgtactatttgtaccacaagagatgtaataaactattgtattgtcaaacggatttgttcaaggaaattatgtgtaatgaacttttgctctagttccatgcaaaagacatttcaatgtacatctgttcatggtgaaaaaaaaaaaaaaaaaaaaaaaaaaaaaaaaaaaaaaaaaaaaaaaag

SEQ ID NO: 292 - DNA, 1695 bp, Glycine max
  CDS (80)..(1441)
attcggctcgagcactatttaccccattttctctaaatccaaacaggccccaaaagaaagagagggaaaattctcttccatggcctcttcacgccctgccaatgtgggaatccttgccatggacatctacttccctcccacctgcgtcacccaggatgctttggagggtcatgatggggtgagcaaagggaaatatactattgggcttggacaggattgcatggccttctgctctgaggttgaagatgttatctcaatgagcttgacggtagttacttcacttcttgaaaaatttaatgttgatccaaagcaaattggacatttggcggttgggagtgaaactgttattgacaaaagcaaatcaattaagaccttcctgatgcaagtttttgaggcaagtggtaatactgacattgaaggtgttgattcaactaatgcatgctatggaggaacggctgctttgttcaactgtgtgaattgggtggagagtagctcatgggatggacgttatggacttgttgtttgtacagacactgcggtatatgctgaaggacctgctcgtcccactggaggagctgctgcaattgccatgcttgtagggccagatgctcctattgcttttgaaagcaaactcagaggcagtcacatgtctcatgcatatgatttttacaagccaaaccttgctagcgaatatccaattgttgatggaaaactctcacagacctgttatctcatggcacttgattcctgttaccggctttactgtgagaaatttgaaaaattggaggggaggcctttttcaatgtcagattctgattattttgtgtttcattctccatataacaagcttgtgcagaaaagttttggccgactatacttcaatgacttcttgagaaatgccagttttgttgatgaagttgccagggaaacccttgcaccatatgcatccttatctggtgatgagagttatcaaagtcgtgatcttgaaaaggcaaaccagcaagctgcaaaacatctatatgatgcaaaggtgcagcccagcacactaatcccaaagcaagttggtaacatgtacactgcatctctttatgcagcatttgcatctcttcttcacaataagaacagttcgttggtaggtaaacgggtagttatgttttcatatggaagtggtttaacagctacaatgttctccttccagcttcaagagggtcaacatccgtttaacttgtcaaacattgtaacagtgatgaatgtttcggacaagttgaagcagagagttgagattcctcctgaaaagttcgttgaaacattgaagatcatggaacaccgttatgggggtaaggactttgtgacaagcaaggactgtagctacttaactccaggcaccttctatctcaccaatgttgattccatgtacaggagattttatgccaagaaggactaggttattggttagttgatgatcgctgatatattcaaatatggagttaaaatgtattttcttatggttcacctgtatttgatcccataaggttgtgtatcaaaatgtttataagatgtttcatttttttgtggtgatcaggttgtaaccaaaataagaataagtttatttgcgaattggcaattgtttttaaatgcactaataatccaaatatattagtagtttcttcttgagtgcaaaaaaaaaaaaaaagg

SEQ ID NO: 293 - DNA, 2262 bp, Saccharomyces cerevisiae
  CDS (220)..(1695)
aagcttcgtatatacaatagaaaaattttccatacaatattacataatactatagagtaatcatacccacaatctccatggctgcggtatcgtgtcgaaaatgaaccgggctattaattatacgagtgtgttgaaagtaggctccattcggcctcatcgggcggaactgtttgggtgcctcgccaattttcgtagccaaattactataaaaggtgcagcatgaaactctcaactaaactttgttggtgtggtattaaaggaagacttaggccgcaaaagcaacaacaattacacaatacaaacttgcaaatgactgaactaaaaaaacaaaagaccgctgaacaaaaaaccagacctcaaaatgtcggtattaaaggtatccaaatttacatcccaactcaatgtgtcaaccaatctgagctagagaaatttgatggcgtttctcaaggtaaatacacaattggtctgggccaaaccaacatgtcttttgtcaatgacagagaagatatctactcgatgtccctaactgttttgtctaagttgatcaagagttacaacatcgacaccaacaaaattggtagattagaagtcggtactgaaactctgattgacaagtccaagtctgtcaagtctgtcttgatgcaattgtttggtgaaaacactgacgtcgaaggtattgacacgcttaatgcctgttacggtggtaccaacgcgttgttcaactctttgaactggattgaatctaacgcatgggatggtagagacgccattgtagtttgcggtgatattgccatctacgataagggtgccgcaagaccaaccggtggtgccggtactgttgctatgtggatcggtcctgatgctccaattgtatttgactctgtaagagcttcttacatggaacacgcctacgatttttacaagccagatttcaccagcgaatatccttacgtcgatggtcatttttcattaacttgttacgtcaaggctcttgatcaagtttacaagagttattccaagaaggctatttctaaagggttggttagcgatcccgctggttcggatgctttgaacgttttgaaatatttcgactacaacgttttccatgttccaacctgtaaattggtcacaaaatcatacggtagattactatataacgatttcagagccaatcctcaattgttcccagaagttgacgccgaattagctactcgcgattatgacgaatctttaaccgataagaacattgaaaaaacttttgttaatgttgctaagccattccacaaagagagagttgcccaatctttgattgttccaacaaacacaggtaacatgtacaccgcatctgtttatgccgcctttgcatctctattaaactatgttggatctgacgacttacaaggcaagcgtgttggtttattttcttacggttccggtttagctgcatctctatattcttgcaaaattgttggtgacgtccaacatattatcaaggaattagatattactaacaaattagccaagagaatcaccgaaactccaaaggattacgaagctgccatcgaattgagagaaaatgcccatttgaagaagaacttcaaacctcaaggttccattgagcatttgcaaagtggtgtttactacttgaccaacatcgatgacaaatttagaagatcttacgatgttaaaaaataatcttcccccatcgattgcatcttgctgaacccccttcataaatgctttatttttttggcagcctgctttttttagctctcatttaatagagtagttttttaatctatatactaggaaaactctttatttaataacaatgatatatatatatattttttttataaagaattgtatatctatatttataacacaataaatctaatctcaacttttttctttaaagttaagcccaaccgattttttttctcattcataaccccgacgtgttttccatgtattcagacaatgctaatgttaaaggtggaatatcagccaatttatgtagaaccagtggcctgatgcgttgacaaaatgcggaaccagcaccatcatccgtgtcgttggataaaaggcacaaaaacgtacaggccactttagaaacatctgagagttcttgagggaatttgacctctggtatgctgttttgtcttgcaggtgtaatttccttagagtcattcaaaaatttggattttagtgccgaaatgggtacctgggattctctttccccgtctgcaatacccaaagctt

SEQ ID NO: 294 - DNA, 1295 bp, Zea mays
  CDS (249)..(947)
ccacgcgtccgtgcttctgctacctttaaggaactattgacaagacataaagcaaccgttgctgaatttctctccaacaattatgattggttttttgaagaattcaactctaggttgctgtcatcaaccaacttgatagcttgcctttttgcgccgctcctcagccatcctctccatctcggtgtcacacactccgcatacgcacctacgagagtcgagtgacagcgagcgagcgagcgagcgaagccatggctctccgcaccctggcatcgaagaacgccctatccttcgcgctcggcggcgcggcccggccgtcggcggcgtccgcgaggggggtgacgacggtcgcgctccccgacctctcctacgacttcggcgcgctggagccggccatctcgggggagatcatgcgcctgcaccaccagaagcaccacgccacctacgtcgccaactacaacaaggcgctggagcagctcgacgctgccgtcgccaagggcgacgcctccgctgtcgtccagctccagggcgccatcaagttcaacggcggcggtcatgtgaaccattcaatcttttggaagaacctcaagcctattagcgaaggtggtggggagccgccacatgggaaacttggctgggccatcgatgaggattttggttcatttgaggcacttgtaaagaggatgaatgcagaaggcgctgctttacaaggatctggatgggtgtggttagctttggataaagaggcaaaaaagctttcagttgaaactacagctaatcaggatcctctggtgactaaaggtgcaagcttggttccgctgttggggattgatgtctgggagcatgcgtactacctgcagtacaagaatgttaggccggattacctgaacaacatctggaaggtgatgaactggaaatatgctggagaggtgtacgaaaatgttcttgcttgaattgtcttaatggacaatactcatctgcgcgggtttgttttcggctgtttgaccatgtgaaataaagatggacttgtgtacctgctggaccaagtgtacatttcgctaagatagactaacgcacaatggcctgccgattttgtccatcctgtattcctgcttgcgtgccactccactttctgctgctcgtagtggcaggcacatagtatgtgcttaacgttagactacggcacggccctttcagagttcgagcatggtgatgcccaaaagaaccatttctactcttgtctccattaataaaatctgccgaggtgccgatgtttgcttgaaaaaaaaaaaaaaaag

SEQ ID NO: 295 - DNA, 800 bp, Arabidopsis thaliana
  CDS (94)..(675)
tcatcttttgtctcaccttttaatttgctaccctatccatacgcacaataaggctattgtacgtatgcaaattaataataaaggagagtagcaatgtcattcgaattacctgcactaccatatgctaaagatgctctggcaccgcacatttctgcggaaaccatcgagtatcactacggcaagcaccatcagacttatgtcactaacctgaacaacctgattaaaggtaccgcgtttgaaggtaaatcactggaagagattattcgcagctctgaaggtggcgtattcaacaacgcagctcaggtctggaaccatactttctactggaactgcctggcaccgaacgccggtggcgaaccgactggaaaagtcgctgaagctatcgccgcatcttttggcagctttgccgatttcaaagcgcagtttactgatgcagcgatcaaaaactttggttctggctggacctggctggtgaaaaacagcgatggcaaactggctatcgtttcaacctctaacgcgggtactccgctgaccaccgatgcgactccgctgctgaccgttgatgtctgggaacacgcttattacatcgactatcgcaatgcacgtcctggctatctggagcacttctgggcgctggtgaactgggaattcgtagcgaaaaatctcgctgcataataactgatggcaaatgcagcattgcctgaagcgctacgcttatcaggcctacgcggatcatcgatgtaggtcggataaggcactcgccgcatccggcaagataaatcgcacgttgtcagcaactg

SEQ ID NO: 296 - DNA, 834 bp, Arabidopsis thaliana
  CDS (142)..(747)
ctgcaggttcaactatctcagatagcggaagcgaccttagtcaatctcgggtggcttgtgctgcaggagacgctcagacgagggaagcgtccggtttttattaatctaggtaaagacaacctgctcaagagaacacactgcatgtcctacgaattgccagcattgccctttgactacacggcactggcgccttacatcaccaaggaaacgctggagttccaccacgataagcaccacgcggcctacgtcaataactacaacaacgccgtcaaagacaccgacctcgatggccagccgatcgaagccgtgatcaaagcgatcgcgggtgacgctagcaaagccggtctgttcaacaatgcggctcaagcttggaaccacagcttttactggaactcgatcaagcccaatggcggtggcgctcccaccggcgcgttggccgacaaaatcgccgctgacttcggcagtttcgagaacttcgtgaccgagttcaaacaagccgcagcaacccagttcggcagcggctgggcttggttggtgctggacaatggcaccctcaaaatcaccaaaaccggcaacgccgacaccccgattgcccatggtcaaaccccgctactgaccatcgatgtctgggaacacgcttactacctcgactaccaaaaccgtcgtcccgactacatcagcaccttcgttgagaagctggcgaactgggacttcgcctctgccaactacgcagctgcgatcgcttagattgcacctgaactaatgctgctctgacagcgatcgctaacgctcggctccggtcgggcgttgcgcgttttaggctgagaaagccgc

SEQ ID NO: 297 - DNA, 2035 bp, Zea mays
  CDS (208)..(1683)
ccacgcgtccgcgaactgagcaagcttttcgacagagaacgtatccctgaacgtgttgtgcatgcacggggagccagtgccaagggtttctttgaggtcactcatgttttctccccccttctcgccttctccttctcccccctagtctagaggcgttgctccccaatcccttcggcccgcccgctcgacgtgatcccaccggcagccatggatccatacaagcaccgcccgtctagtgggagcaactccagcttctggaccaccaactccggcgcccccgtctggaacaacaactctgccctcaccgtcggacagcgaggtccaatcctccttgaggattatcatctaatcgaaaagcttgctcagttcgacagagaacgtatccctgaacgtgttgtgcatgcacggggagccagtgccaagggtttctttgaggtcactcatgatgtctctcaccttacatgtgctgattttctccgtgctcctggggtccagacacctgttattgtccgtttctctacagttgtgcatgagcgtggaagccctgagaccttgagggatccacgtggttttgctgtcaagttctacaccagagagggtaactttgacctcgtgggtaacaacatgcctgtgtttttcatacgagatgggatgaaattccctgacatggtccacgctttcaagccgaatccaaagaccaatttgcaggagaactggagaatagtagatttcttctctcaccacccagagagcctacacatgttcaccttcctctttgacgatgttggcatcccactcaactacaggcacatggagggctttggtgtcaatacctacaccttgatcaacagggatggaaagcctcaccttgtgaaattccattggaagcctacttgtggtgtgaaatgcttgctcgacaatgaagctgtgactgttggaggcacctgccacagccatgcgacgaaggatctatatgattccatcgcagctgggaattaccctgaatggaagctctacatccagactattgatcttgaccatgaggataagtttgactttgacccgctcgatgtcaccaagacctggcctgaggatatcatcccgctgcagcccgttggacggatggtcctgaacaagaacgtcgacaacttctttgcagagaatgaacagattgctttctgcccagcgattattgttcctggaattcactattctgatgataagctgctccagacgagaatcttctcctatgctgatacccagaggcaccgccttggtccaaactatctgatgcttcctgtgaatgcaccaaaatgtgcccaccacaataaccaccatgatgggttcatgaacttcatgcacagggacgaagaggtgaactacttcccttcgaggtttgatcccgcccgtcacgcggagaaggtccccattcctccccgtgttctaacaggctgtcgtgagaagtgcatcattcagaaggagaacaacttcaagcaggctggcgagagatatcgttccttcgaccctgcaaggcaagaccggttcatccagcgatgggttgacgcactgacagaccctcgcgtgacccatgaacaccgtaccatttggatctcctactggtcccagtgcgacgccgctcttggccagaagctggcttctaggctgaacctgaagccgagcatgtaagatcgacgaggaagaaagcaggcaccggtggccaaggatgcaacgcaacatggagcgtgtgatgtttacaccaatataattgaataaacaggggatgtgcgcgtcgttgtacttatgctgatgctgatggtcggtggtcgattatatatactggaacttctggtgtatgctcttctcttctggggagacgtaatgtaacgaagaagaatgtgtcattgtggcctgtggtacaaaccctgctgtgtatgggcctgtctataagaaacagcgatgagctgtgacgttatgtttctgacagtttatttactaatgagcacatctttaatttactagaaaaaaaaaaaaaaag

SEQ ID NO: 298 - DNA, 2164 bp, Zea mays
  CDS (30)..(1511)
ccacgcgtccgctagctagctgaatcacaatggatcctaccaagttccgtccgtccagtagccacgacacgacggtgacgacgacgaacgctggcgctcctgtgtggaacgacaacgaggcgctgactgtggggcctcgcggtcccatcctgctggaggactaccacctgatcgagaaggtggcgcacttcgcgcgcgagcgcatcccggagcgcgtggtgcacgcgcgcggcgcctcggccaagggcttcttcgagtgcacccacgacgtgacgtcgctgacgtgcgccgacttcctgcgcgcgcccggcgtgcggacgcccgtgatcgtgcgcttctcgacggtgatccacgagcgggggtccccggagacgatccgcgacccgcgcgggttcgccgtgaagttctacacccgcgagggcaactgggacctgctgggcaacaacttccccgtcttcttcatccgcgacggcatcaagttccccgacgtgatccacgcgttcaagcccaacccgcggtcgcacgtgcaggagtactggcgggtgttcgacttcctgtcgcacctccccgagagcctgcacaccttcttcttcctcttcgacgacgtgggcgtgccgtccgactaccgccacatggaagggttcggcgtgaacacgtacacgttcgtgagcgcggcggggaaggcgcagtacgtgaagttccactggaagccgacgtgcggcgtgcggtgcatcctgacggacgaggaggcggcgctggtcgggggacggaaccacagccacgcgacgcaggacctgtacgactccatcgcggcggggagcttcccggagtggacgctgtacgtgcaggtgatggacccggacacggaggagcagtacgacttcgacccgctggacgacaccaagacgtggccggaggacctgctgccgctcaggcccgtggggaggctggtgctggacaggaacgtggacaacttcttcaacgagaacgagcagctggcgttcgggccggggctggtggtgccagggatctactactcggacgacaagatgctgcagtgccgggtgttcgcctacgccgacacgcagcgctacaggctgggaccaaactacctgatgctgcccgtcaacgcgccgcgctgcgcgcaccacaacaaccactacgacggcgccatgaacttcatgcaccgcgacgaggaggtggactactacccgtccaggcacgcgccgctgcggcaggcggcgccgcccacgccactgccgcccaggccagtcgccgggaggagggagaaggccaccatacgcaagcccaacgacttcaagcagccaggggagaggtaccgctcctgggacgccgaccgacaggaccgattcgtgaggcgattcgccgactcgctcggacacccaaaggtcagccaggagctcaggtccatctggatagacctcctcgccaagtgcgacgcgtcgctggggatgaagattgccacccggctcaacatgaagccaaacatgtgatgcttctgctgaataataatgaagacacgcatgcatgtcgtcgtcaggaacaagagaaataatacaagaccagcacgcatgggcatactctatattatagatggccaaaaagcacgaggcccgtgagcccggcacgaagcccgctttttgggcccggtccgagcacggcacggtagaataagcgggcgggcttgaacaggaaactaggcacggcgggctagcccggcacggcctgtttacctctaagcccgttaaacccgtttttttttacactaaaacgtgcttaccggcccgtttagcccgcttttcggcccgttatttcgtgctaaacgggccggcccggcccgtttaggcccgctgcgggccgggcttggacagaaacttaagcccgctggctcagcaggcccggcccggttttggccgggcttcaccggcccgtttggccatctctactctatatatatgtatagcccgtgcccgtgtccgcatttgtaccaatacaagccaagcctagtcaagtggatgtgtattattgttgcgctatcacatacatgtacccctgctacctgaagatggatgtgtatcgagttatcaaattaaggcaccagcagcaaacgctatatatatattgcataaaaaaaaaaaaaaag

SEQ ID NO: 299 - DNA, 1294 bp, Zea mays
  CDS (197)..(1063)
ccacgcgtccgcaactggaggccaatagaatcgctcgcttgcgttatcttgttcgcctcgtcagttgttgtttcctcccttcccatcccccactgctcagcagtcagtcagcactcgccacccacacgcctccgctccgcccacggttccactccaactctccgatctccaggaatccgcggctgaggcgccggcgatggcggctcccatggtcgacgccgaatacctgcgccaggtcgacagggcgcgccgccacctccgcgccctcatctccaacaagggatgcgccccgatcatgctccgcctcgcatggcatgatgctggaacttatgacctgaagacaaaaactggtggtgcaaatggttcgattagatatgaagaagagtacactcatggttcaaatgctggtttaaagattgctatcgatctccttgagcctatcaaagcaaagaatccaaagataacatatgcagacctgtatcagcttgctggagtggttgcagtcgaagtgactggggggccaactgttgaatttattcctggcagacgtgattcgtcggtgtgcccccgtgaagggcgtctgccagatgctaagaaaggtgcaccacatctgagggacatcttttatcggatgggcttatcggacaaagatattgtagctctatcagggggacatactctgggaagggctcaccctgagaggtctggattcgatggtgcctggacaaaggagcctcttaagtttgataactcatactttcttgagctgttgaatgaggaatctgagggacttttaaagctcccaactgacaaggcactgttatcagatcctgaatttaggcgctatgtggagctctatgcaaaggatgaagatgcgttcttcaaagattatgctgaatcacacaagaaactctctgagcttggcttcacgcctcgcagcacagcaccatccaaatcagatcttccaaccgccgccgtgcttgcacagagtgcctttggggtagcagttgctgcagccgtagttatcgctggctacttgtacgaggcttccaagaaggccaagtagagggcgaagttcttctccacatggctttgctttagtaagtctgaagatcgaataacaggaccatatctgaagatcgaataacggatcatataaatgagttactcggaaaatgttctgaaatccttacgaacagaacgttgccttcatgtttacactgtactcatgagtcacagtgatatggagatggcatagcctactattggaagtaaaaaaaaaaaaaaaaaaaag

SEQ ID NO: 300 - DNA, 1595 bp, Zea mays
  CDS (57)..(1397)
gcgtgagatcgaggagaagaaggcaagcaggcagagaaagagagagagagagagagatggatgaggagtacgacgtgatcgtgttggggacggggctcaaggagtgcatcatcagcggcctcctctccgtcgatggcctcaaggtccttcacatggacaggaatgactactacggaggagaatcttcgtccctgaatctaaccaagctctggaacaggttcaagggcaacgacagccctcccgagcacctgggcgtcagcaaagagtacaacgtcgacatggtgcccaagttcatgatggcaaacggcgcgctggtccgcgtcctgatccgcaccagcgtgaccaagtatctcaacttcaaggctgttgacgggagctttgtgtacaacaatggcaagatccacaaagtcccggcaaccgacgtggaggccctcaagtcgaacctgatgggcctgttcgagaagcggcgcgcccggaagttcttcatatacgtgcaggactacgaggaggacgaccccaagtcccacgagggcctggacctcaacaaggtcaccaccagggaagtcatctccaaatacggattggaggatgatacggtggactttatcgggcatgcgctagcacttcaccgggacgacagctaccttgacgagcctgcaatcgacactgtcaagaggatgaagctctatgcagaatcactcgcacgctttcaaggagggtccccttacatctaccctctatacggtctgggagagctccctcaggcctttgcccgcctgagcgctgtttacggtggcacgtacatgctgaacaagccagaatgcaaggtcgagtttgatgagagtggaaaagcgtatggagtcacttctgaaggggagaccgccaagtgcaagaagatcgtctgcgatccttcgtatttgccagacaaggtgaagaaggttggaagggtggcccgcgcgatatgcatcatgaagcatcctatcccggacaccaaggactcgcactccgtgcagatcatcctccccaagaagcagctaaagcgcaaatccgacatgtacgtgttctgctgctcctacgcccacaacgtcgcgcccaaaggcaagttcatcgccttcgtctccaccgaggccgagaccgacaagcctgagatcgagctcaagcccgggatcgacctgcttggccctgtagaggagaccttcttcgacatctacgacagatatgaacccgtcaacaaccctgacgacgactgctgtttcctcacaaatagctatgactccaccacccattttgagacgacggtcaaggatgtgctcgccttgtacaacaagatcactggaaaggagcttgatctctcagtcgatttgaacgcggctagtgctactgagcaagaagctgcttgaacaccccggcggcctctttttttgcagctctacacaatagctatttcttcgattttttttttaaaatgttccatagatggataagtttattgatgaaatccattattgtatgttttttggagttccgtttttgtcacatgcatgtaatgaacaacggtggcaatcatctataaaggttccattattcgctcgcga

SEQ ID NO: 301 - DNA, 1675 bp, Glycine max
  CDS (45)..(1418)
gaaaccctaaaccccgttttcggtgagatcgagatcgatcgaacatggatgaggagtacgatgtgatcgtgttgggcacgggtctcaaggagtgcattctcagcggtcttctctccgtcgatggcctcaaggttctgcatatggataggaacgactattacggaggagaatccacttcgctcaatcttattcagtttgaactgcgaaatgatgattttctctgtcctcctcttcagctttggaagagattcaggggagatgacaagcctcctccacatttgggcgctagcagggactacaacatcgatatgaaccccaagtttattatggctaatggcaatttggtgcgggttctcatacataccgatgttactaagtatctctatttcaaagctgtggatgggagctatgtgtttaataaaggaaaggttcataaggtgcctgcaaacgacatggaggccttgaagtccccacttatggggctatttgaaaaacgccgggcacgcaagtttttcatttatgtgcaaaactacaacgagagcgatcccaagacccacgaggggatggacttgacaagagtgtctactaaagagttgatagcaaaatacggccttgatgataacactatagacttcattggtcatgctttggcgcttcatagcgatgatcgctacttggctgagccagcactggacaccgtgaagagaatgaagttatatgcagagtctcttgcacgctttcaaggagggtcaccttacatatatcctttgtatggtttaggagagcttccccaggcatttgcacggcttagtgctgtttatggtggaacatatatgttgaataagcctgagtgcaaggtagaatttgatgaggaaggaaaggttgttggtgttacatctgaaggggaaactgcaaagtgtaaaaaagttgtttgtgatccatcatatttgcctggcaaggtgaggaaggttgctagggttgcaagggcgatagccatcatgagccacccaatccccagcactgatgattcccattcggtgcaaattattttaccacagaaacagttgggtcggaagtcagacatgtacctattttgttgttcgtatactcacaatgttgctccaaagggaaaatttattgcatttgtatcaaccgaggcagagacagatcagccggcaattgaactgaaacctggaattgaccttctaggacctgttgatgagatattttttgatatctatgacagatatgaaccagtcaacgaacccactttggacaactgctttatatcaacaagttatgatgctactactcactttgagtcgactgtggatgacgttctcaacatgtatacattgataactggaaaggttattgacctcagtgtggatcttagtgctgctagtgctgcagaagagtaaagaaaactcggtgatgatctgttgctgatgggttccgtgatgatggacttgacaacgaatgttattaacgttttataataaatattttctttttttaaaacaagatttgtgtggctggggaactttttcccgtccagaagctctgttgtgtgttcacatacattgccttctgcagtggttttagtttggtaatgtagtgttattttcatattgttaaatgttaattgcacgtctctccaaccatttcaaaaaaa

SEQ ID NO: 302 - DNA, 1696 bp, Zea mays
  CDS (463)..(1203)
cggacgcgtgggcgcggcgccggcgcgtcgggtcgtgcccatcacgttgtctccactccgtcgcctctcctctcctctccgtccctgcgccacgcgggggagattaaagcgaagcgcctccccgctcacctctcctctcgtcgtgcgttggatcaaagtatcaaaccaatctcccctcgccgtccggccggcgtgcgcgcggggcctctttttttggagccttgcgccgcggcccgttcctcctgtccgaaataatccgcctcgacgtgttcgcctccccctccccctccctctctcccctcccctcgcgactcgtctcgtgcgtgactgcgtgctcgctctccttttcgctgcgctcatctcggtatctgtgccagcgctcgcctctccccgccggcccgccctccttcctttccttgtctagccgaaggccgaagccactgcgcgcgcgtgcgtgcgacgatgtcgtcggcggtggaggccatctcctgccccaaggtcgacgtccccgccggcccggagccgggggagccggccaaggaagcggcgccgcccgcggagcactgcgacacggcgcccaacggcaagtgcgcgccgcgttgtcacggggaggaggaggaggaggaggaggacgaggaggacgaggagaaggcccccaaggccatcgacctcggtcccatggtcagcatcaaggagcagctcgagaaggacaaggacgacgagagcctgcggcgatggaaggagcagctcctcggcggcgtggacttgaactccgtgggagagacgctggagccggacgtgaagataatgagcctgtccatcctgtcgcccgggcggcccgacatcgtgctgccgctgccggtggagcccaacggcaagggcgtgtggttcaccctcaaggaaggctccccgtaccggctcaagttcaccttctccgtcagcaacaacatcgtctccggcctccgctacaccaacaccgtctggaagacggggctcaaagttgacagagccaaggagatgctcggcacgttcagcccccagctggagccctacacgtacgtgacgccggaggacaccaccccgtcgggaatgtttgcccgggggtcctactctgccaggaccaagttcctcgacgacgaccgcaagtgctacctggagatcaactacaccttcgacatccgccgggagtggccgtcgacgagctgaccatccttccctccctccatcggtggcctgagcagaccagtcgtttcgttctgtgttcttccttttctatgttgcctcgtcctgtcctgtcactaggttttttgtttgttcaccgtcagcttgttcgctgcggcttgctgcggctgcaatccggctgcggctgcggcttctacagtatttttctctctatggattgcagctgcagcagtccaaacagctgcaacagtgtcggcttgtagccagccgaacacgccccgtgttgctgcgtgcgtgacgcacggtgcgtctatgtgccctttcccatgcgccagttgtctgctgtgttgacaccgttactagacagtgcaaatgtcaggtcggtctaccggactgtgcgtgcgtcagcgtgttcaacttgtcgatcagggtctcgttttttccgaaccgcctgttgagttaagacttcagagcaatgaagctgcgttctgcgtagtaaaaaaaaaaaaaaaaa

SEQ ID NO: 303 - DNA, 660 bp, Zea mays
  CDS (13)..(408)
tagagcgccgccatggctcaggtaaggggcagtgctcgtggcactggcagtggcagcagcgccgccgcgctggcgctggtcctcctgtgcgcgctcctccgcggcgagttcgccgagtcggcggtgtacacggtcggcgaccgcggcgggtggagcttcaacaccgctagctggcccaacggcaagcgtttccgcgccggcgacgtcctcgtgttcaggtacgacgccagggcgcacaacgtggtgcccgtgagcgcggcggggtacagctcgtgcagcgcgcccgagggcgccagggcgctcgccaccgggaacgaccgcgtcacgctgaggcgcggcgccaactacttcatctgcagcttcccaggccactgccaggccggcatgaaggtcgccgtcaccgccgcctaggcactgcagggcggccaatcagccggcggagagcgccgcgctcacggagtaaagcacgtagctaattagacggtgctgccttgctgttcaataatatcgtctgtcgtcgcgtacttcataacctgcgcggcgtgttagtagttgtttggtggtgtttggcgactggcactacagagaagtgtcagatcgagtgatgtacttgctaccaacaataaaggtatacacggtttgtgtgttcacttgaaaaaa

SEQ ID NO: 304 - DNA, 724 bp, Zea mays
  CDS (109)..(489)
ccgatctgcatttcactcgttccacaccgtcgttggccggcccatagctctccccctcctggttagtgtagtgagcgcagcgacgagtgcaacggtgagagtaccgagatggctgagggaagaggcagtgcaagggccatcggcgccatggcgttcgccgttgcctgctgctactgctgcgtcgccatcgccgacgcagccaccacctactacgtcggggacagcaacggctggtccttcagcagccccagctggcccaacggcaagcacttccgcgccggagacactctcgtgttcaggtacatcccctggatccacaacgtggtggccgtggacgaggacgggtacaacggctgcacgacgccgccggggtcgcggacctacacgtccggcgccgacagcgtgacgctcgccaggggggacaacttcttcatctgcacccggttcggccactgcaacctcggcatgaagctcgtcgtctatgccgcgtgatctgtcagagctagcgactggtggtggtattgttgactgggtgcgctcaatgatcggctgtgcttgctctcgagcgaactggtctgtttgatttgtgctatttcgtgtaggctcagtcagtcgcttggttctaatccgtaacggcttctactacttttacaatgttgttgtaacaatacaaacatccagctttaattgaagctaacggatatcgcatgtttgaacaaaaaaa

SEQ ID NO: 305 - DNA, 863 bp, Glycine max
  CDS (83)..(463)
ggacacaatcaatcccattattaaagggataagccttcaaccttgcaacacaacactacaacctaaggtctgcactacgagaatgtctcagggaagaggcagtgcatctttacctattgtggtcactgtggtttcactactgtgccttttggttcttttggaacgtgctgatgcagcaacttacaccgttggaggacctgggggatggaccttcaacactaatgcttggcccaaaggaaaaagattcagagctggtgatatcctaatcttcaattatgattcaacgacccacaatgtggttgctgtggacagaagtggatacaacagctgcaaaacgccagggggtgctaaagtgttcagttcagggaaggaccaaatcaaactagcaagagggcagaactacttcatatgcaactaccctggtcactgcgaatctgggatgaaagttgccattaatgcagtgtgatggtgcttaatacttcttgagttgaagtgaaaattaagttaatggtcaattagctagcattagtaaatgttagtgtgtgctcatgtatgtactttttttatatgaagctgttatatatatttattaatcactatagttttgtgaagcaaagtgggagtgagctggcttggtagatcaattgttcctatgtttggtatgtgttgtgtagtgggagtataaaaatggtccattagtcacgggctcttcttattagacattggatctacatattttgaagttattgaaagtctcagagccaattatctgtatctgtgtgtcggtgtcacagtgtatggttctattactgattttgtttgcttcaataaattaaatttcctaaaaaaaaaaaaaaaaaaaa

SEQ ID NO: 306 - DNA, 1075 bp, Zea mays
  CDS (323)..(868)
gcattcatcactttcctgactcacctcactcgatcatcctccagtcttgtcgtcgcctgctagcttgaatattacgccagcatctcgccaggaaaatggcgggcactactccgcgccgcttgctcctggtcatcgtccccctcgtcgccgtcgtgccggcgtccgcaaaagactacatggtcggcgactcgtccgggtggaagtccggagtggactacgctgcctgggccaagggcaagccgttcgccatcggcgacacgctctgtacgtgccaaataaagctcgtcgtcagattcagatacgtacagtacagtagccgccaatgctgtgtccatgcatgcatcatgttctcgtatataatgtcagtggcacgttcgttcgatcgtccgcgtgtatatctcagtatctcgtgaaggagaaatccagtgaccccgcgcggcctgccggttcttgcgttgcagcgttccagtacagctcggcgcactcggtgctggaggtgagcgaggcggaccacggcgcgtgctcggcgagcaacccgctgcggtcgcaccagggccagagcaccaccatcccgctcaccaaggccggcacccgctacttcatctgcggcgcccccggccactgcgcctcgggcatgaaggtcgccatcaccgtctccggcggcggcggcggcggcagcagcagcgccgacaacaccgcgactccgtcgggtccctccgtgcgggcgatgaacacgaagccggcgttcggtctccggtccggtggcgcgacgacgacggacgagtcggactccagcgcggctggcagcggcgcccgcctcgcgatgggcctgctgttcggggccgcgggcctcgctgcaataatgggctgaattgaggacccgctagggaaaaggcagtgcggtttcacgaatttcctatttagtttcctgcgttctctgcttgcgtccccgagtcgcgaggctgagtgttcggccgtgcatatttttcgtatacttttgctgtgtttttttggggctattcgttgttcaatactgttgtttcagaataaaatttcatccttgaccattcaaaaa

SEQ ID NO: 307 - DNA, 1003 bp, Zea mays
  CDS (62)..(646)
ccacgcgtccgctgcaagctcatccgtctctgtcgatcagcaagaggccggggtcagaggaatggcggcgacgtcgcggctggcgctggccctcctgctggccgccttggtggcggcgtggcagctgccggcggcggcggtggcggccaactacacggtgggcgacgagaaggggtggaacccggacgtggactacacggcgtgggtgaagaagcacaagccgttctacaagggagactggctcatcttcgagtaccagaacgggcggtcggacgtggtgcaggtggacgaggtcggctacgacaactgcgacaaggccaacgcgctgagcagctacagcaagggccacacctacgccttccagctcaaggacgccaaggactactacttcatctgcagctacggctactgctacaacggcatgaagctccacgtcacagcaaagtcatcatcctcatcctcctcttcctcgtccggatctgactcctcctcctcctcctctgacgacgactcttcctccccctcgccgcccgccaagaagtccaaggccaagaccagcgccgcgccgccaccgtcactcctcgctgccacgcccatggctgccgccgccgccgccgccgctgctctgctcctcaacaggatgctctgatctggtctggtctggtctgctctgcgtatgtagtcacgtcacgtggctccagatcttgcttgggcgctgatgagctacactacactacactagtttttttcttctgcttttagtttttttccccctcaccacttgagattggggaggcatcttctgcttctagcttgcttgctgcttcttgaattgcgtgactgttattggttggttcttgcttccattattttgcctttttctttctttctttcttgcttccagcttgttgttgatgcagttttttttttcaagagacaagattagtataatgtcaagtgtgaatgaagagctctatttatttatcaaaaaaaaaaaaaaaag

SEQ ID NO: 308 - DNA, 1264 bp, Zea mays
  CDS (56)..(1105)
acttggcgggcgaaaggcgaaaccgacgtgctcccgggcgggcggcgacagcggcatggagcgagagcggcaggcagtggcgaggaacaggaaggtggtgctgcgcgggtacatcgaccgcgcgcccagggaggaagacatggagctcgtcgacggcggcgccgtggagctgcgcgtccccgagggcggcggcggccccgcggtgctggtgaagaacctctacctatcctgcgacccttacatgcgcggcaggatgcgggacttccgcaactcctacatcccgcccttcaaacctggatcacctattgaagggtttggcgtggggagggtggtcgactccactcatccaggattcagtgctggtgacgttgtttccgggatgactggatgggaggactacagtctgatcaccaagcctgaacagctcaggaagatccagcaaagcgacataccactctcctatcatctgggccttcttggcatgcctggctttacagcttatgttggattctatgagatctgttcaccaaagaaaggggagtttgtttttgtttctgctgcatcgggagcagttgggcaaattgttggtcaacttgcgaagctccatggttgctatgttgttggaagcgctgggacagatcagaaggttgagctcttaaaggaaaaattcggatttgatgcggctttcaattataaggaagagcctgacttgactgctgccctgaaaaggcacttccctgaaggcatagacatctacttcgagaacgtaggcgggccgatgcttgatgctgtactactcaacatgcgagtacatggccgcattgcggtatgtggcatggtttcccagcacggggtgactgctcctgccggaatccacaacctgttctccttgataagcaagaggatagagatgaaggggttcatccagagcgattacgtgcacctgttcccgcagttcgtcgatgacatcaccaggcattacagagacgggaagatcgtgtatgtggaagacatgagcgttgggctggagagtgggccggcttccttcgtcggtctgttcagcggtaaaaatgttggcaagcaggtcgtctgtgtgtcgcgggattgaaaggcctggattttgttccctactggccagtacccttaaataaaatcaggaaaacattattttcaactccgagaaggaccccactagccagtaccacggtcgtaaatctcaaggtcatgtttattttttctcctgtattaaaaaaaaaaaaaaaaa

SEQ ID NO: 309 - DNA, 1323 bp, Glycine max
  CDS (103)..(1128)
attcggctcgagattactccctatattaacccaacaatgcaaaacaacacactgaactctcttcactgaaacgacacacacaaaaaaaagctttagtttaggatgacccaagtgaggaacaagcaagtggttctaagagattatgtcaccggattccctaaagaatccgacatgaacattgttgaaggcaccataatattgaaggttccagaaggttccaatgatgtccttctaaaaaatctctacttgtcatgtgatccatacatgcgactcctcatggccaaggaccgttctttcggagatggctccttcacccttgcctctccattgaaaggatatggtgtgtctcaagtgctggaatctggacgtccagattacaagaaaggtgatttagtgtgggggattactaaatgggaagagtatagcttggtcccctcatctctcatacatttcaaaattgagcacactgatgtcccactttcctactacactggaattcttggtatgccaggaatgactgcttatgctggtttctttgaggtaggttctcccaaaaaaggagacactgttttcgtttcagctgcctctggtgctgttggtcaacttgttggccaatttgctaagttgactggttgttatgttgttggaagtgctggaagtaaagagaaggtggatctgctgaagaataaattaggatttgatgaagcttttaactacaaagaagagccagacctcaatgcagctttgaaaaggtactttccagaaggcattgacatttactttgagaatgttgggggcaagacacttgatgcagtactcccaaacatgaaatttcatggccgcatacctgtctgtggaatgatctcgcagtacaatcttactcagttcgatggtgtaacaaatttggcaaatctcatatttaagcgggttaaaatggaaggttttattgcaactgatttctatcatttatatccaaaattcttggagtttgtcctgcctcatatcagagaagggaaggttgtgtatgtggaagacattgctgagggccttgagaagggccctgcagccttggttggcctctataccggtcgcaatgttggtaaacaagtggttgttgttactcacgagtaaaattatataaatatattgttattctctaagctttaattccgaattttcaattttctgttggatattgaaccttgcttttatggtttatgcagtcattcttctattttgttgatagaaattactacattagtgacattttgtgataaataaaacctctaatatatgctaatttgttaaaaaaaaaaaaaaagg

SEQ ID NO: 310 - DNA, 1216 bp, Zea mays
  CDS (6)..(1079)
ccccgatggcgacgacggcgacgaaccggcgggtgatcctcaaggagtacgtggagggatatcctcgcgaggagcacatggagctgctccagggcgccgaggttcccctccgcctgacgggcgccgagccggccgggtccgtcctcgtcaggaacctctacctctcctgcgacccctacatgcggcccaagatgtcgcgcccgctgcgggagtcctacacggccgccttcgtcccgggcgacaccatcacaggctacggcgtcgcgcgcgtggtcgactcctccgacccgcgcctcgcgcccggggacctcgtctggggcatcaccggctgggaggactacagcgtcgtgacgccgcccgccaccaggctcctctccaagatctcccaccacggggtcggggagggggcgggcgtgccgctgtcctactacaccggcatcctcggcatgccggggctcaccgcgtacgtgggcttccacgagatctgcgcgccgaagaagggcgagaccgtgttcgtgtccgccgcgtccggcgccgtcggccagctggtgggccagttcgccaggctcgccggctgccacgtcgtcggcagcgccgggtcccgggagaaggtggagctgctcaagaccaggttcggcttccacgacgccttcaactacaaggaggagcccgacctcggcgccgcgctcaagcgctgcttccccgacggcatcgacatctacttcgagaacgtcggcggcgccatgctcgacgccgtcctgctcaacatgcgcgtgcacggacggatcgccgtctgcgggctcatctcgcagtacaacctggcggacggggagaaggacgccgtgcgcaacctcgccgccgtcatctccaagcgcctccgcctgcaggggttcatcgagcccgaccacaagcacctctacccgcagtacgaggcgtgggtgctgccgtacatcagggacggcacgctcgcctacgtcgaggacgtcgccgaggggctcgagagcgcgcccaaggcgctcataggactcttccacggtcgcaacgtcggaaagcagctcgtccgcgtcgccgacgacgagtgagacgcgcctcacttcgattggaccagacgatccatgtgtcactgttgctatgtttcgattccccattttcattttaataattaattgtgccaatggatgcttttgttcggaaaaaaaaaaaaaaaaaaaaaaaa

SEQ ID NO: 311 - DNA, 1165 bp, Zea mays
  CDS (47)..(1051)
ccacgcgtccgctttaacgcccgaaacgaacacctgaaactacaacatggcggatctgatcaaggcagtcgatatccgaggcggtaaaggcgagcgagatgccctcttcatcaaccctcagacgccaaagccctcgcctactgaaggacaggccctcgtccgtgtcaaagcctttggcataaaccgcatggatatagtccagcgacgcggcttttacccgcttccgcctcaagcccccgcaacgctgggcgtcgagttcagcggcaccatcgagtcccttgggcctggtgaccacggtgcctttaagcaaggtgacgaagtctttgggcttgcctacggtggcgcctacgccgagtaccttgccgtcagcacacgcatgttgctgcacaagccgtcgtccatggactttgtgacatgcgctggcatcccggaaacctggatcacggcgacacaggcactgcaccttgtgcttggcttcaccaaaggtaagtcgatcttgtggcatgctggtgcctcgggcgtgtctattgctggcatccagctgtcaaagattgccggtgcatcccaggtctttgccacggccgggtcccaggaaaagtgcgactttattacctcgaagctcggagccaccgcggccttcaactacaagacgcaggactgggcggaggagatcaagaaacacaccgacggtaacggcgtcgactatatcgtggactttgttggtgcaagctacttccagcagaaccagacggccgctgcacgggacggacgtatcgtcctcctgggtacgctgggtggtgtcaagatccccgaagccgacatctcgcagatcctgtacaagaggctccgaatcgagggcagcacgctgaggagccgggacgaggagtaccagggaaagcttcgtgaccgcctcgaagagtatctcccagactttgagtcgggcaagttgaagatccttgtggacaaggttctgccatgggaggagatccaggaggctcacaagcacatggaagaggccaagaatctgggcaagatcatatgtactatctcgtaggtaccatccataactcgaaaataggagacaactcttgacgacgccacgcttgtgttcgtcaaagcaaagaaatccatcgctttcctcaaaaaaaaaaaaaaaaaaaaaaag

SEQ ID NO: 312 - DNA, 3950 bp, Aspergillus nidulans
  CDS (384)..(1961)
gaattcttgaggagctagccgagtacggcactagcgctgtttccccgggatccgctggttccggagcgtgcgcggtgcctggtacaagggtagtttgcaactccggggtggtgatcatacgatatacccgttatgatttagattcagccaatattggtaagtcctttcggcagagcgctcgtctctatcgccgatcatctttgtgtgcggatggtcgtcgtgcagtactctgtaccccgttctactctagtgtcgcggcggacacggaagctagtaattccgttccgaaggcgatctcggagcccggtcagcgagtcaccgagtcacctgcaaatgcaatgcggcggccatgatccgttcacatcgccctcgtgcctgctgaaatgagtccgctgaacggcgtcgctcgttcctttccgcggcccttccaggccgtgaccaggcggccttttcgagttgtccagccggccatcgcctgtccgtccaacagccggtcgtttaaccattctcgatcattacgatcaacggggtctcagtcccccgctccatccccacgcgactcctcgaatcccgcgctgtccttcccttgcctcgacgcccaggaggccaagtccgctcttctttccgcgcgatctcttggttcaggccctgaaccctcctataccgccggccaccacgaacgattccattccgacgaaccgctgctccttgattggggcggtttgcttccagaatttgatatcgcatatgagacatggggccagctgaacgagaagaaggataatgtcattctgctgcataccggtctgtctgcatctagccatgcgcacagcaccgaagcgaacccgaagcccggctggtgggagaaattcataggtcctgggaagacgctagatacggacaagtactttgtgatctgcaccaatgtccttggagggtgctacggtagcacggggccctcgacggtggacccgtcggatgggaagaagtatgctacgcggtttcccatcctgacaattgaagatatggtgcgagcgcagttccgccttttggaccatcttggggttcggaaactctacgcgtccgtcggctccagcatgggtggtatgcagagtcttgcagccggtgttctgttcccagagcgagtgggcaagattgtgtcgattagcggttgtgctcgaagccatccgtacagcattgctatgcgccatacccagcggcaggtgttgatgatggatccaaattgggctcgaggtttctactacgattcgatcccacctcattcaggcatgaagctcgctcgcgagattgccaccgtcacgtaccgcagcggaccagaatgggagaaacgctttggtcggaaacgggctgatccgagcaaacagcctgcgctttgccccgactttctcatcgagacgtatctcgaccacgccggtgaaaaattctgcttggaatacgatgccaacagcctgctctacatctccaaggcgatggatctgtttgacctagggttgactcagcaactcgcgacgaagaagcagagggcggaggcccaggcgaagattagcagcggaacaaacactgtcaatgatgcgtcgtgcagccttacacttcctgaacagccataccaggagcagccatctgcctcgacatccgccgagcagtctgcttccgcttcagagaccgggtcggctccgaacgatcttgttgccgggcttgcgccgctgaaagaccatcaggtgctggtaatcggagtcgcaagcgacattctcttcccggcgtggcaacagcgcgagatcgcggagactctgattcaagcagggaacaagaccgtggagcatattgagctgggcaacgacgtgtctctctttggtcatgacacattcctccttgatgtcagaacgtcggaggcgcagttcgcaagttccgtactagtcggctcgcacataattgtacaatagaggtcaatgataacgaagcgtatttttcagtggactccaggagagtcgttatattttcgcaggcaagacgatgtcttaattgcttattcccggttacaatgactggggtgcgctggtgtcttcccagcggaatatatactgtggcgctaatgacaaacaaaacatttctaagccgatattgcctccgacatgaactcgaccttgacgttaaatcatacggacagaaaagaatactatctggctcaatcagtggattactgcatccagcttcactgtgaagagcagatcaagtgtcctcttatcagtcgctagcggcaggctcactttggcggttctcattctttagaggtttaaccatatagaataaccgtgaaggttgtacccaagagcagaaagggacctttgtcctcccatattcggtgcaacatcattaatatatcaatcgcaatggaaatggatttgctttgtgcgactgagtttgttgcttacattctgttgcttacaatatacctccgtacattacatggmccaattgatcactgggtwgagsggtcctccgtacattacatggaccaatgatcactggtgarcgggtgtcasctcgcggcggctgtttttccaccttcacctccccgatgcctcttcgtctaaataccgattacccttcctatcttgtgttttcgtcttcgagttactgatggagttggacaggtgaaaaggaaccgaatgaaacatattacactggcgcatgactggcgatatgacgttcacacacgattcctacactattgcgtggatatgcgccttaccgatagagttggcggcggcaaagatattcctkggacgaagttcmtcctcgacttcatcaaccaaaatcggatctcaatgtctacactcttkggagtattggcggccataatatagtggtggtctgtctccctgcggtgtctatgggacaacttcggctactgcgcggtggcatacttgaagtctacctacccgaatatccagttcgccttgacggtcggcatcggcggcggggtcccattaggaaaacctgatatacgtctgggcgatattgtggtcagcaagccatctgataccttcggcggcgtcattcagtatgattatggcaaaacggtgggcaatggacacttttaccatacaggatcgctcaacaagcctccgccgatactgctcaagacgatcgcccagatggagagtgattatatgctcggcaaaatctcactttgcaatatcatggccagcagcctgcataaagaggaagtgcagacacagtttccgagaccatcaaaagatcagctcttcaatcaacttacgaaccacgttgggaacaagtccgactgctcggcttgtgatacgagcgagctagtggatcgccctgaacgcacgacagaagagcctcaggtccactatggtctaatcgcttctggaaatcaggtaatgaaagatgcgagaacacgcgactctatcgctcaaggccggaacattctgtgttttgagatggaagctgcaggactcatggatgaaatcccgtcgcttgtaatacgaggcatctgtgactactgcgactcccataaacataaggagtggcagggtacgcagcatttgttgccgctgcctatgcaaaggcttgctcacattaattccgatacatggcaagggtgctgttcgaaatggagtcaaagaggatccgmattggatggtcccctttcgaaagaacccgggatttgttggtcgrraaggaaaatcagcaaaatcgatggattgatccaggagatccatggacctttaaaaatcagcaatctgcggactaggcagacgttggaaagacccagattgctcttgaactagcttatcgcacgcgcgaacatattctggatcccatgtacgacctatgcgagtattgaacaagcttgcgtgaatatagcccaacttgttggaatgcagggattaaagccaggggaa

SEQ ID NO: 313 - DNA, 2001 bp, Synechocystis PCC6803
  CDS (801)..(1547)
cattctcttcatctgttgttccgattcccgggtggaccccaatttaatcacccaatcggaagtgggcgacctgtttgttattcgcaacgctggcaatattattcccccctatggagcagccaacggtggggaaggggcagccatggaatatgccctagtggcgctggaaattaatcagatcatcgtctgtggccattcccactgcggagccatgaaaggtctgctcaaactcaactctctccaggaaaaacttcctctggtgtacgattggctcaaacatacggaagccacccgccgtctagttctagacaattacagccatctggaaggggaagatttgattgaagttgctgtggcagaaaatattctcacccaactcaaaaacctccagacctatcccgccatccattcccggttacatcggggagacctttccctccacggctggatttatcgcattgaagagggtgaagtactggcctacgacggtgtactccatgattttgtcgccccccaaagtcgcatcaatgccctggagccggaggatgagtacgctctccatcccaactcacccctgatttcctacgatgcgtttaaggttcccggcaaggaacgtcctggtcgtgagaaagcaacagaatccccagctccccaactgtctcctttacctggttttggccatttgcccagggaacaggcggagcgcatttatcgaggctcccgttagactgggttaaaccccattgcaacctttgtcggataaacgcaaacaatgccaattttaggtaggaattgaccggatgctgaattcactaattgctgactttaggattatttttgagcgagatcccgctgcccgcaattggttagaggtgctgttttgttatcctggcttgcaagctttactaatacatagattttctcatcgtctttatactctcgggctacctttctttcctcgcctaatgtcccaccttgcccgctttttcaccggcattgaaatccatccaggggcccagattggccagggcgtgttcattgaccatggcatgggggtagtgatcggtgaaacggcgatcgtgggggactattctttgatttaccaaggggtaactctggggggcacaggaaaagaaagtggcaagcgtcacccgaccctgggggaaaatgtggtggtgggagctggtgctaaggtattgggtaacattgccatcggtgataatgtccgcattggggcggggtcagtggtgttacgggacgtgccagcagattttacggtggtgggggtgccagggcgcatggtgcatccttccggggaaagggttaatcctttggaacatggtaagttaccagattcggagggcaaagtaattcgcctattattagaaagaattgaattactagagcaacaggtggccaccttacaacagcaacaatcggaacaggcctgggaatcggattatcgctcctgctctgaaactgaccgggaaccggtgctctgtcgccttggcgatcgcgaaattgaagaatttttggggggcaccctctgatattctcccggtagccataactgggatgggatgtggaggggcataggaggtgactatttgttggttcacttaggaattttggacagaactttggtggttaaccacacactgtcgccaaacttgccccattttgctccgagggaattttctggggttggtgttgcgggaaaagccttggcgatcgcctttttttgtcctcaatttttggccggatgttttttcctgtttaataaaatctttctaattgtcttaagatgtgaacgcaaggccgtcctcaagggcggggtttcagacccattttttcgatgaataaccaacaactttggcaacgttatcaagattggctttattaccatggtggcctcgatttttacctggatgtgagccgcatgggatttagtgatgctttggtagaagatttgcaacccaagtttgccaaagcttttcaaga

SEQ ID NO: 314 - DNA, 701 bp, Synechocystis PCC6803
  CDS (36)..(638)
tatttcaatactcaccaagttttaagcaaacagcaatgacagaggtattaagggtaggacagccggcaccggatttcaccgccacggcgatcgtcgatcaaagcttccagaccgtcaaattaagcacctaccgtggtaagtacctggtgctgtttttctatcccctagatttcacctttgtctgtcccacggaaatcattgcctttagcgatcgccatagcgaatttactgccctagatacggaagttgtgggcatctccgtagacagcgaattttcacacctggcctggattcagaccgaacggaaaatggggggcatcggcaacattaactatcccctagtgtcagatctcaaaaaagaaattagccaagcctataatgtcctcgaacccgatgcaggcattgccctgcggggactattcattattgaccgggaaggcatcttacaatacgccaccgtcaacaatctctcctttggccggagtgtggacgaaactctgagggtactaaaagccattcgccatgtgcaatctcaccccaacgaagtttgcccagtggattggcaggaaggagacaaaaccatgatccccgacccggaaaaggctaagacctacttcgagacagtggcggaaccttaggtttgcccagccaaaaatgccgaccctaaatggataattttgactactaggctgactggtgag

SEQ ID NO: 315 - DNA, 1001 bp, Saccharomyces cerevisiae
  CDS (108)..(698)
ttgttttttgctacttacattgtttatcttgaaatatccaaagtgaacactattactgttttttgctcaagaatatattagccttacaagaacgtaaaaaaccaatcatggtagcagaagttcaaaaacaagccccaccatttaagaaaaccgccgtagtcgacggtatcttcgaggaaatttcactggaaaagtataaaggtaagtacgttgttctagcttttgtcccattggctttttcatttgtctgtccaactgagattgttgcgttttccgatgccgccaagaaattcgaagatcagggcgcccaagttttatttgcctccaccgactctgaatattccttactggcatggaccaaccttcccagaaaagacggtggattaggtccagttaaagttcctttgcttgctgataagaatcattccttatccagagactatggcgttttgattgaaaaagaaggtatagctttaagaggtttgttcataatcgacccgaagggaatcattagacatatcactatcaatgatttatctgttggcagaaacgtcaatgaagctttgagattagtcgaaggtttccagtggactgacaaaaatggtacagttttgccatgcaactggaccccaggagccgccaccatcaaacctgacgttaaagattccaaggagtatttcaaaaatgccaataattaatcttcgcacgataacgctaggccctattaaataattaaaaatacatcaccctatatatgataagaaagatggttttgtattattatgaaattgacttgaaagaatagtgtaacaaaagaaaaagaaactgtaattgaagaatgatatgcatttctatgtgtatattaacttaatcatctttatatccagaagacgcaaatgaccattcgacgtatttttcccatgcaggtttgttttcgtataatctgcctgcaagatccaaataacttcctactgttaacgaatccattgagtatggtttct

SEQ ID NO: 316 - DNA, 1581 bp, Saccharomyces cerevisiae
  CDS (730)..(1512)
gattgtttaactatctcgccatatttagtgagggaagcgcgaactgtcgttgattgtttatgtgtttattttatgtttatcgttcttagagggtggcgcgcactgtgcgcgcatatgtgggccatacgcagacatatataaagaactaagaaaaggtgaaatgggactctacgatggcgctaatggtaaggtctcttttctatttgcctaattcagatacaatatataattgccaacctcaaagaagaagaattatgggcatattgaccttctccggtttccctcccgcgctctcgtatccgtctgcatttgacctcgagcaagcgctccactatgtctatatgtttaccagtaaaacttcttaacgtttgtgatattttttgaacttcaaccacattcagtatgcgtgtgtatataaagatattcctgatagcactatgtttatctttatacaatatacaaaaggtcacccaggacgagcagcgcggctatttttctatcattccgtgaatagcgaccaacggtcggcggctatttttttttttgcaattttttcgggatgggttccccggcaaaagctagccccggagatttttaattacgtaaagaaacaaggggccggatgttgctgctattggtatataaagagagaaggagagatatagaaaattgtgcttctagattctcgcagtaggatgagataaatttcaaagaagcaggaagcaaaggatgtttagtagaatttgtagcgctcaattaaagaggacggcatggacccttcctaagcaggctcacttgcaatcacagacgattaaaacatttgccacagcacctattctgtgcaaacaattcaaacaaagtgatcaaccaagactaagaataaactctgatgctcctaactttgatgctgacacaacggttggtaaaatcaatttttacgactacttgggcgactcttggggggtcttgttttctcacccagcagatttcacccctgtctgcaccaccgaagtcagcgcattcgccaaattgaagccggaattcgacaagagaaatgttaaattgatcgggctttcagtggaagatgttgagtcccacgaaaaatggattcaagacatcaaggaaatagcaaaggttaaaaatgttggtttcccaataattggtgacacttttagaaacgtggcattcctatatgatatggtagatgccgaaggattcaaaaatatcaatgatgggtcactgaagaccgtgaggtctgttttcgtcatcgatcccaagaagaagattagactgatttttacctacccttccaccgtcggaagaaacacttctgaagtgttaagggtaatcgacgccttgcaattgactgacaaggagggcgtagtaactccaattaattggcagccagctgacgatgtcattattcctccctctgtctccaatgatgaggcgaaggctaaatttggtcaatttaatgaaattaaaccctatttaagattcaccaagtcgaaataagctttgaaataaacgactttactatatacaggtatatgaagtatctctaactaaaacttttatcta

SEQ ID NO: 317 - DNA, 1001 bp, Saccharomyces cerevisiae
  CDS (103)..(750)
aaaagatatagaaaagggaagagaaatatcattgttattacatccactggatgaagtaatactacgagctttatacaggtaatattaaagttccttaatagaatgggtgaagcactacgtagatcaaccaggattgcaatatccaaaagaatgttggaagaggaagagtccaaactggcccctatttcgacaccggaagtgcctaagaagaaaatcaagacgggtcctaaacataacgctaatcaagcagtagttcaagaggcaaataggtcatctgatgttaacgaattagagataggcgatcctattcctgatttgagtcttttaaatgaagataatgactctatctccttgaagaaaatcaccgaaaataacagagttgtggtgttttttgtgtatcccagggcaagcacgcctggttgtactagacaggcctgtggatttcgtgacaattaccaggaactcaagaaatatgctgctgtctttggactgagtgcagattctgtgacatcccagaaaaagtttcagagtaaacaaaatttgccatatcatttactaagcgatccaaagagagagtttattgggttgctaggagccaaaaaaacgccactttctggttctattagatcgcatttcatttttgttgatgggaagttaaaattcaaaagagttaagatatcaccagaagttagtgtaaatgacgccaaaaaggaggttttagaagtcgctgaaaagtttaaagaagaatgaagtttaataaccccctttttgtttctctagaggagtacttatcggtaaaatattccaaacccttccctttatatatgtagataaacgaagatattctaactctctcacacttataaaatatcgagcctgcagaaggtcataaatatttatatacaaatgggaaagtacttaacgatccgacttgatcaatatcaaatatcgtggcctggtttacattgagaacgggcactatttctttggacgaaatgttg

SEQ ID NO: 318 - DNA, 1572 bp, Saccharomyces cerevisiae
  CDS (657)..(1187)
ctgatatgagcgtgcgtgtgagtgactttacacttgtctatccacgtcctgaagttgttcgtgttctttggatattcgtgttcaagctaataatgagcctttaaggtaatacaatttataaaccaccaccttggcctcgatctattgcgcttatgttgtctattagtaatcaagaaaagaaccctaaatcatcggcgtcccctgtggggctctcggaaaaaccggtcctgacgtcactgaaaagatttcggcacatggtcatgggaccagagaaaaattaatccgacatgtggaatatttccttccgttaaggtagtgagcgcggattttttctgatttgtaattatacggggagctctggccaaaaaggtcagtatttggtgatgaagttgaatatcatcttttgattttcttctgtatcattctttttctttttccacaccccttccggacggtattcacatattgttgagaggttaaatgaaaaataaaggggtggaaaattaaggacgagatgtaagggaaaagcataaacgaaacattatataaaggagcacaatttcctctcccttgccaattgtgcatataccgtttctttataacgaaatttcaacaaaccagaacaacacaagtactaccaataaccacaacaaaacatgtctgacttagttaacaagaaattcccagctggcgactacaaattccaatacattgctatcagccaaagtgatgctgacagtgaatcttgtaagatgccacaaacagttgaatggtccaaattaatttctgaaaacaagaaggttatcattaccggtgctccagctgctttctccccaacctgtactgtcagccatattccaggttacatcaactacttggatgaattagttaaggaaaaggaagttgaccaagtgatcgttgttactgttgacaacccgttcgctaaccaagcgtgggctaagagtttaggtgttaaggacaccacacacatcaagtttgcctccgacccaggctgtgctttcaccaaatccattggtttcgaattagccgtcggtgacggtgtttactggagtggtagatgggccatggttgttgaaaacggtatcgttacttacgctgccaaggaaaccaacccaggtaccgatgtgaccgtttcctcagtcgaaagtgtcttggctcatttgtagatgctatgtaatagacaataaaaccatgtttatataaaaaaaattcaaaatagaaaacgattctgtacaaggagtattttttttttgttctagtgtgtttatattatccttggctaagaggcactgcgtatacttcaaggtacccctgtgttttgaaaaaaaacaacagtaaaataggaactccgcgaggttcaggaacctgaaacaaaatcaataaaaacattatatgcgtttcgaacaaaattaaagaaaaagaataaatatagattaaaaaaaaaaagaagaaattaaaagaatttctactaaatcccaattgttatatatttgttaaatgccaaaaaagtttataaaaaatttagaatgtataaataataataaactaagt

SEQ ID NO: 319 - DNA, 718 bp, Zea mays
  CDS (37)..(522)
ccacgcgtccgcccacccgtcccctcctgctcgcccatggctcccatcgctgtcggcgacgccctccccgacggccagctcgggtggttcgacgagaacgaccagctgcagcaggtctccgtccacgcgctcgccgccggcaagaaggtcatcctcttcggcgtccccggcgccttcaccccgacctgcagcaaccagcatgtgccaggcttcatcacacaggctgagcagctcaaagccaagggtgtagacgagatcctgcttatcagcgttaacgaccccttcgtcatgaaggcgtgggcgaagacctaccccgagaacaagcacgtgaagttcctcgccgacggatctggagcgtacaccaaggcgctcgacctcgagctcgatctcacggacaaaggtctgggcgtgcgctcgaagaggttcgctctcctggccgacgacctcacggtcaccgtcgcaaacatcgaggaaggcgggcagttcacgatctctggcgctgaggagatcctgaaggcgctttagaagccgcagcaacgatcggtctagtttgaactcgcctttgaataacttgtcgttggacaaggtctagttcggtgttgtgtatggaacggtcgtcactgagtcatgcacgatttggtatccgtgtgtttatgttcgccggtttgaggaactctctgatccgtcgtgacacaaaaaaaaaaaaaaaaaaaaaaag

SEQ ID NO: 320 - DNA, 1129 bp, Glycine max
  CDS (160)..(939)
cgcgtttggctttagcatttagcattttctctctctctctctccacgctgttactttatcatataacctgactcaccccacccaatcctattcccatcccatttgaacctctccttctcgcagagtgagcgagcaagcgaatatcccaatcccacaccaatggcatgctcagccacctctgcttccctcttctccgcaaacccaacacccctcttctctcccaaaccctctctctccctccaccttaaccctctccccacgcgcccttctccctccctcacgcgcccttctctctccctcacgcgcccttctcactctcgccgctccttcgttgtcaaagcctcctccagcgagcttccgctggttggtaacaccgcaccggatttcgaagcagaggctgtgtttgaccaggagtttatcaacgtgaaactatctgattacattgggaagaaatatgttgtgctcttcttctacccgttggacttcacctttgtctgccccacagaaatcactgctttcagtgaccgacatgcagagttcgaggcactaaatactgagatattgggtgtttcagttgacagtgtgttctcgcaccttgcatggatccaaacagatagaaagtcaggtggccttggtgacttgaactatcctttgatttctgatgtcaccaaatccatatcgaaatcttatggtgttctcattcctgatcagggaattgcattgagaggattgttcattattgacaaggaaggggttattcagcattctaccattaacaacttggcaattggtagaagtgttgacgagacaaagagaactctccaggccttacagtatgtgcaggagaacccagatgaagtttgccctgctgggtggaagcctggggagaagtccatgaaaccagaccctaaacttagcaaagactactttgcagcggtgtagctaggataatagttaagagtggctatctgcatctgtatcaatcagtgaattgcaaaagggtcttgttttttttaatgttttgtaagtccttaaattttgagccgcagggtttggtaatatgcgtgctggtgtactggattttgaagtgtactatgtattaatttgcaatttctgttcattaaaaaaa

SEQ ID NO: 321 - DNA, 996 bp, Glycine max
  CDS (104)..(745)
atcctctctgtatctttggttcagcagccattagcgatttcccttatctctctccatcttaactccaagcacaagaatcatcttcccatttcgtttctgaccaatggcttccctcactgtcccaaaccattgtgttcccactttgcttcgcactcactctctcaactacccatcttcccaaaacctcccacttccttccgcgccatcaaattctcaattttttggcctcaagctatctcattcttccttttccacaattccctcttcttcttcttcactcaaaggctccattttcgccaaggtgactaaaggttcaaagccaccgaattttacgctaaaagatcagaacgggaagaatgttagcctctccaacttcaaaggaaaaccagtagttgtgtatttctaccctgctgatgagacccctggctgtaccaaacaggcttgcgctttcagggattcatatgagaagttcaagaaagcaggagcggtggttgttgggataagtggtgatgatgctgcctctcacaaggcatttgccagcaagtacaaacttccatttactttgttgagtgatgagggtaacaaggtgaggaaagaatggggagtgccaggtgatttctttggatcattgcctggaagagagacttatgttcttgacaaaaatggggtggttcagctcgtctacaacaatcagttccaaccagaaaagcatattggtgagaccctgaaaatacttcagagtctttgagacattctgattcttttgttggctatcttagctggcctgattcagagtcagacaagtatgtaactatgaattgtaagtttgtaaccactgtaattatgtagctgattttggagcctttgatcacattcacatgggggtgatgatatgtattctcctatagagagcaaacatttataacctctccggatggaataatgccttcatttgccacaaatacaatcagattatatctgtatcttttgcaaaaa

SEQ ID NO: 322 - DNA, 972 bp, Zea mays
  CDS (117)..(836)
aagcgcttcgcaagcacaggcagtgatcggcaaccaaatccggacagtcttgagctctctcagtctcagcatttcagttcccagattcacatagccccagccccacaagtagcgaaatggcagctgctccgttcgcgattgccggccggctctcccccgttgcgcgcctcccggtccgcgcctggaggccggcgcacgggtttgcgtcgtccgggagagcccgctcgctcgccgtggcgtccgcggcgcaggagaacagggacaacagtgtcgacgtacaggttagccagaacggcggcaacaggcagcagggcaacgccgtgcagcgccgcccgcgccgcgcgacagcgctcgacatctccccatccccgttcgggttagttgatccgatgtcgccgatgcggacgatgcggcagatgctggacacgatggacaggctgttcgacgacgccgtggggttccccatggggacacggaggtccccggcgaccaccggcgacgtacgcctgccgtgggacatcgtggaggacgagaaggaggtgaagatgcggatcgacatgccgggcctcgcgcgcgacgaggtgaaggtgatggtggaggacgacacgctggtcatccgaggggagcacaagaaggaggagggcgcggagggcggcagcggtggcgacggcgacgggtggtggaagcagcgcagcgtgagctcctacgacatgcggctggcgctgccggatgagtgcgacaagagcaaggtgcgggccgagctcaagaacggcgtgctcctcgtcaccgtgcccaagaccgaggtggagcgcaaggtcatcgacgtgcaggtccagtagacaaactgagctgtcacgacgggtctttgtgtagcactagcgtgggttgggctcttcgcgccgaccgtatcagtactcgtgacccaacgtgtggaataatgtgaataaataaacgcttcaattctgctattcc

SEQ ID NO: 323 - DNA, 1014 bp, Zea mays
  CDS (79)..(732)
caccacaacagcgaaggagaaagcagaccaacctagccacccagggagaaaggccaaaagggaggggagagtgtcgtcatggcttccattgtcgcttccaggagggccgttcctctagttcgcgctctggagaagctcatcgcagcgtcctccgcgcccgggactggctccgccctcaggccggtggcagtcgccggcggcctccgtggctacaacaccggcgctccgctccgacgctacgagggggccgagtcggaagacgatagcgtccgcgagtacgatgggcggcacggcggccgggactacgccgtgcccagcctgttctcagatattttccgtgatccgcttagtgcgccgcacagcattggccgcctgctgaacctgatggacgacttggcggtggcggcgccaggtcgtgcggtgcgccgtggctggaacgcgaaggaggacgaggaggcgctgcacctgagggtggacatgccgggcctggggaaggagcacgtcaaggtgtgggcggagcagaacagcctggtgatcaagggcgagggcgagaaggaggatagcgaggacgaggccgccccgcctccgagatacagcggtcgcatcgagctcgcgccagaggtttacaggatggacaagatcaaggcggagatgaagaacggcgtgctcaaggtggtcgtgccgaaggtgaaggagcagcagcgcaaggacgtgttccaagtcaacgtcgagtagatgtttccaaatagaagcaagtgccggtacgggatggaggattggagcctggaggggcactgccaaactaggattcctctctctcaatctgatctggattctggaatcagatttctcttctttcatttttctcgtctatcttctatcagtatgaaataagcaacgtcgcttcagttttcgtgtcaaggccggtggagtcgcctatgtttattttattttctttgtatttcctacctggacacacgttctctatgccgtgtttggtttccgcagattttt

SEQ ID NO: 324 - DNA, 943 bp, Zea mays
  CDS (112)..(735)
ccacgcgtccgacactgggtaggaagagcgcagaaaaaggaagcagcagctttgatcgggtggagtttcttgctcactgatcgtcgagtgaagcctttgtggtccgtgacgatgtcgaggagagccgcagcgttgttgctcgcgtgcctcgtcgccgtgacagcggcggcgctggcggacggcgcgctgctcccgtggttcggcgacggccggcgcgggctcgacgaggcagcggtgaccgacgtgggcctcctggcggccgacccgttccggatcctggagcacgtccccttcggcttcgaccgggacgacgtggccatggtctccatggcgcgcgtggactggcgcgagacccccgacgcgcacgagatcgtggtcgacgtgcccgggatgcgcagggaggacctcaggatcgaggtcgaggacaacagggtgctgcgcgtcagcggcgagcggcggcgcgctgaggagcgcaagggcgaccactggcaccgcgaggagcgctcctacggcaggttctggcgccggttccgcctccccgagaacgccgacctcgactccgtcgccgccagcctcgacagcggcgtcctcaccgtgcgattcaggaagctggcgcccgagcagatcaagggcccgcgcgtcgtcgggatcgccggaggagacggtggcgccgaggcgaaggagagcatcggaactggcgccggagatggtcatcagaccaagaaggtggagctctgaacagtgaggtgggaattgggatgactcaatgacggagatggctctgcgcgtgtgcgtagttttactagtttatgtgttcgcgtttttcttttttgtgacagcgtatatgcacttgtatggagtggaagtgtgccatgttttactgaggaataaaaacctacagtactagtgtactaaaaaaaaaaaaaaaaaaaaaaaaaaaaag

SEQ ID NO: 325 - DNA, 937 bp, Zea mays
  CDS (28)..(690)
cggacgcgtgggtaaacgtcgaccattatgggaccttacagcaccgccgtcgccgtaagcgcatcgccggtcctgcaggcttcctcactcttgacgcgagcccgtggttcttggaggcccacggtggcggcgttgcggctttctgcttccgtgaaatgccgtcggcgggcactcaccgtgacctgtgcgctcccggagaaagaacggccggcggcattcaacatcccgcccactgctctgctgtgccccgtgcccccgccggacggcaaggaacggtgggacatcaaggaggaagatgaccgcgtcacgctgtggctccaggtgccagggctgtcggcgagcgacatcgaggtgaccaccagcgaggacgtcctcgagatcaaacgcagggtcgtcgccccacagcagccggcgcccgtggacgcgcacggcgtcggcgcgttccacatccggctgctgttgaccaaggagtacgacggcagcaacgtcacggccgatctcaaggccggcatgctggaggtcaccgtccacaagaacccgcaacgccccggcgaacgcgccgtgatgatgggggcgaccaagcccccgcccgagccccgtcaaaacgaggagagcagtaccaaccaaaggtcctcgaccgcaagaaaggaaaccggaacccccatggggagacaaaatccaaatggagtctagctggttgagggctcggaccctgctttgaataagcttctcatttctagctgcggatggactcaaaccagcaatcgccttctgttatatcaattgcctggagagagcttacgctgcttgtagtatcatgtgtgtttccttaaaaaaacccttctttgtttctttatttattatgagggtttttttttggtgtgcggtcacacagagtgaaaacaattccattttctaagcaaaaaaaaaaaaaaaa

SEQ ID NO: 326 - DNA, 862 bp, Zea mays
  CDS (103)..(597)
ccacgcgtccggaatcacacaacagcagctcaaaaaacccaacacacctcaacaagcagagcaaagacccgggattcgccggcgcggtagcgagagcgagagatggacgggaggatgttcggtctcgagacccccctgatggtggcgctgcagcaccttctggacgtgcccgacggcgacgccggcgcgggcggcgacaaggcgagtggtgccgcggcgggcggcgggcccacgcgcacctacgtccgcgacgcgcgcgccatggcggccaccccggccgacgtcaaggagctcccgggcgcgtacgcgttcgtggtggacatgccggggctgggcacgggcgacatcagggtgcaggtggaggacgagcgggtgctggtgatcagcggcgagcggcgccgggaggagcgcgaggacgccaagtacctgcgcatggagcggcggatgggcaagttcatgcgcaagttcgtgctgccggacaacgccgacatggacaagatctcggcggtgtgcagggacggcgtgctcaccgtgaccgtcgagaagctgcccccgcccgagcccaagaaacccaagaccatcgaggtcaaggtcgcctgaggtgggactaggtcgaccgatcgtggctctgaagatgtgggagcagtgccagcgagttgtgaggacctctacctgtgtggaatgtggcgaggaataatcgtagtctgtagtgggggtgcttctggtgtgcgtgtttgcttccttcggtcgcggtgtctgtctaccaattcctatctgatgtatcggcttcggtttcgtatgaaccatgccggatgctttcagtaaaaaaaaaaaaaaaaaaaaaaaaaaaaaaaaaaaaaag

SEQ ID NO: 327 - DNA, 958 bp, Zea mays
  CDS (229)..(690)
attcggctcgaggagagaagtccagacgattcagcgaccgctcttgacgaagctataaaagcgtcaccccacaaggccacaactcgtcccaacccaatcccaatccagagcgaagatcgcgatcagagcaggagcaggcaacgcgcaccgaaatcttccaatccacaagactcgctacttcgcagttggcagactcgcccgcagcgagccgctagcaaccaagcagaaatgtcgctggtgaggcgcggcagcgtgttcgacccattctccgtggacctcttcgaccccttcgacagcgtgttccgctccatcgtgccgtcgtcgtcgtcggcggcggcggcctccgagaccgccgccttcgccagcgcccgcatcgactggaaggagacgcccgaggcgcacgtgttcaaggccgacctccccggcgtgaagaaggaggaggtgaaggtggaggtggaggacggcaacgtgctgctcatcagcgggcagcgcagcagggagaaggaggacaagggcgacaagtggcaccgcgtggagcgcagcagcggccagttcgtgcggcgcttccgcctccccgagaacgccaagaccgaggaggtgagggccgcgctggagaacggcgtgctcacggtcaccgtgcccaaggccgaggtcaagaagcctgaggttaagagcatccagatctccggctgaagaagacatggacgcgaggtgaatggtcgcgtcgcgttcgcgtcgcggcgtcgggtcttgggtttcagcgacgcgactcgtgtgtgtggtactgtggttgctctgctttggtatgtctggtgtgtacgtgtgctgttcagtgtttcgtggtcatcgtctgtacattgtgctgttcggtgagctccccgactcagtgtgttgtgttctgcgagtgaataaataaaaacaaaccagctgtcgtctcgtgtaaaaaaaaaaaaaaagg

SEQ ID NO: 328 - DNA, 904 bp, Zea mays
  CDS (73)..(696)
cttgctgatcacagctagtagggagcgagagttaccttgaaatcaaggcagtacgtacgagtacgatcgacaatgtcgacggtcacttcttgcacctttctgagcctcgggtccccagtgcggccggcagtctcctccgcgagaccggcggcggcggcggtggcttcccgacggaggccccggtccctttctgtgtgctgcgaggccggccggaaaggggatcacaacccaaagacggatctgcatccatttaacatccctgccttcgttctggtgcacccggtggcaccacgtgaggaacggtggcagctggaggaggacgccgacaaggtgaacctgtggttcgaggtgcctgggcagtccaaggatgacctcaccgtggagatcgacgaagacgtgctcgtcatcaagaagaggaaggagctggtgggccagcggagccctgctggcggtggcgtcgcagagtacggctcgcagtcccagcagcagagcaggaggggcaccgcagatggcaaggagctgccggcggcacagcagggccaggccggcgaggtggtctatgcccggatgctcctcccggcggggtacagcagggatggcgtgcaggccgagctcaagtccggcgtgctcagggtcactgtcgtcaaggtcacggagcgagcgcgcaggaagatcgacgtccccattcaagtcaagtagatatgcgtgtatgtgtatgcacattcgtcctgcgcacgtgtcagcaggggtgctttatttacatctgtctcatgtccaacatgcagactacagcggtcgatctcaccacgtactcgatcgcgtcgactacacatgttcatgggctttgtgttcccatgtactcatcaatcaataaaatgagcatatgtgttctccgccaaaaaaa

SEQ ID NO: 329 - DNA, 3598 bp, Saccharomyces cerevisiae
  CDS (508)..(2904)
cttccgagacgttgcatcaaaggccaagacatggcattagtcacccttgttgcaacgatagacgcatactacggacccctcaaacctccctacctgcccgtcgctatcgcattaattttctttttttccactatttttccggcccgccacacctccgactacaagacgccacatctacgttttgtcacacaaaatccaggacaatagccgtctgcaaggcaccaaggttttcagcagttgcttgttgctgctgcctgttaatcacatcaaacccactgcaagggcagtcgatgggtctgtaaacgccttagcaatcgttgttgaagaaagagagctcttatcatcatggggtgcccatcatttttctttttttttcaaattttgggctattcaatgaattgtttcgactatatatggacaatcatcggaagctgtgtattcttggtaaaaagttttcgactgtgtggcagaaaataaccgcaacaattatataacgtcacagaacacatgagtaccatttatagggagagcgactcgttggagtcggagccctcgccaacgccaacaaccattcctatccagatcaatatggaagaggaaaagaaagatgctttcgttaagaatattgacgaggacgtcaataatctcactgcgactactgatgaggaggaccgcgatccggaaagccaaaaattcgacaggcattccatacaggaggaaggtctcgtttggaagggcgaccctacatacttgcccaattctccatatcctgaagtgagatcggcggtgtccatcgaggatgaccccaccatccgcctcaaccactggagaacgtggttcttgaccacggtgtttgtggtagttttcgccggtgttaatcaatttttttccctgagatatccatcgctagagatcaacttccttgttgcacaagttgtttgctacccaattggtaggatactggctctcttgcccgactggaagtgttctaaagtgccatttttcgatttaaacccgggcccatttaccaaaaaggaacacgccgtggtcacaattgccgtggcgcttacttcctctactgcatacgctatgtacattttgaacgcccagggaagcttttacaacatgaaacttaatgtcggatatcagttcttgttggtttggacatctcaaatgattggttatggtgctgcaggtcttaccagaagatgggtcgtcaaccctgcaagctctatctggcctcagactttaatttcagtgtccttgtttgattcgttgcactcgagaaaagttgaaaagacagtcgcaaatggttggacgatgccccgttacaggttcttcttaatcgtccttatcggatcgttcatctggtattgggtacctggattcctctttaccggtctgtcctatttcaacgttatcctatgggggtcgaagacaagacacaatttcatcgctaacacaatctttggtactcaaagtggtctcggtgcgttgccaattacatttgactacacccaggtttcccaagccatgtccggctctgttttcgccacaccattctacgtctccgccaacacctatgcatcagtgttgatattcttcgtcatagtgctgccatgtctttattttacgaatacctggtatgccaaatacatgcccgtcatttcaggttctacttatgacaacactcaaaacaaatacaacgtaacaaagattcttaacgaggattattccattaatcttgagaaatataaggaatactcaccggtattcgttccattttcctatcttttgtcgtatgctttaaattttgccgctgttatcgccgtttttgtccactgcatcttataccacggtaaagatattgtcgccaagtttaaagaccgtaaaaatggtggcactgacattcacatgagaatctactccaagaactataaggattgtcccgattggtggtatttacttttgcagattgtcatgatcggtttaggatttgtagcagtgtgctgtttcgatactaagttcccagcttgggcatttgttattgcaatattaatttcccttgtaaatttcatcccgcaaggtatcttggaagcaatgactaaccaacacgtaggtttgaatattatcacagaattgatctgcggttatatgctgcctttaagaccaatggcaaacttattattcaagctatacggatttattgtcatgagacaaggcttgaatttgagtagagatttgaaattagccatgtacatgaaggtttcccctcgtttgatctttgccgttcaaatctatgccactatcatatcaggcatggttaacgttggtgtccaggaatggatgatgcataatatcgatggcttatgtaccaccgatcaaccaaatggcttcacttgtgctaatggtcgcacggttttcaatgcttccattatctggtctttgccaaagtatcttttctcatcagggcgcatttataatccgctgatgtggttcttcttgattggtttgctattcccactagccgtttatgctgttcaatggaaattccctaaatttaaatttgctaagcacattcatactcctgtatttttcacaggcccaggtaatattccaccaagcacaccttataactactcattattttttgcaatgtcattctgcctaaacttgataagaaaaagatggagagcttggttcaataagtacaatttcgtcatgggggccggtgttgaagcaggtgtggcaatctccgtcgtcatcatcttcttgtgtgtacagtacccaggtggtaagctcagctggtggggaaacaacgtttggaaaagaacgtatgataatgattataaaaaattttataccttaaagaaaggtgagacatttggttatgataaatggtggtaatcatgaaaacataataataaacctgcagaggttcatatcaagttttaattcaaaatttggcacacgtaatagcaaactttagttcatattctgtaatattaagaaattattttcttttctgtcatcctttcatattgcttaacttgaaatactttatctcaacgtttaattatactgttaataatgatatttctatattttagagcacattttggtcgaaacattcaaagcgacccctgcaatatttagcggaggcatctcatccgccttatttttgtaaattaacgatctttagcgcatgccaagtgttcgataacaaattccgactttaagaaaaaacgggcacgagcatacaataaaaaaacttttaaaatttatacctccttgaggtgttctattttatgatagatccgtatttcagataccaaatgttatatacacttttttaagcttggatttttttctgaatacacggaccttacaaatgctataaaaaaaaaaaagattctgtaacttgtaaaattaagggccctaaagggccatatccacctcacatttcactgtgatataagtaggatattttgacttcaatacttaaatttacaagccaaatattttattatgacttcaaaaaaaaaaaggcttctagcattcagaaataatgctgactgtgaaaacaactataactaca

SEQ ID NO: 330 - DNA, 2025 bp, Zea mays
  CDS (220)..(1779)
cggacgcgtgggctctcctctgctaggcacttgtcacaggaaggccccctcgtgttcgcgtcctcttgccttcacacccgggacgggagttccttgctagggggagagcttcccttgctcgtgtcctcactcacgcactcacagactcactcattcaccgacggtcccagtggactgaggtgagacttcggtcggagccggccggacggaacatacaggatggccgccgcgccgccgcccaaggccgacgagctccagccgttcccgcccaaggagcagctgcccggcgtcgccttctgcatcaccagccccccgccatggccggaggccatcttgctagggttccagcatttcgtcgtcatgctgggcaccaccgtcatcatacccagcgcgctcgttcctcagatgggaggcggaaatgaagagaaggctcgggtggttcagaccatactgttcgttgctggcataaacaccctgttccagacgttattcgggacgcgccttccggtcgtgatgggcggctcgtacgtcttcgtcgggccgaccatctcgatcgtcttggctggacggtacagcaacgaagcagaccctcacgagggcgctctcctcgttgcgtcgacgattcagatcatacttgggttcagtggcctctggcgcaacgttgtcaaattactgagtccgctggcagctgttcctctggtatcactggtcgggttcgggctctacgagcttggctttccaggggtagcgaaatgcgtcgaagttggcctcccagaactgctcctgttggttgtgttttctcagtatctgcctcaggttctggacttcggcaagtccgtcttcagccggttcagcgttctcttcaccgtcgccatcgtgtggctgtacgcctacatcctcaccatcggcggcgcttacaagaactctccgcccaagacgcaggtgcattgccgcgttgatcggtcgggccttatttcaggagcaccttggataagtgttccctatccctttcagtggggtgctccgacgtttgacgccggagaagctttcgctatgatgatgacttcgttcattgctcttgtagagtcaactggcgccttcatcggtgcttcgagatatgcgagtgcaactatgattcctccatcgattatcagtcggggcgtgggatggcagggcattggtctgttgctcgattcatttttcgggacagcgaacgggacatcggtttcagtagagaatattggactgcttgcgttgacacgcattggcagccggagagtggtgcagatatctgcaggcttcatgattttcttctctgtccttggaaaatttggagctttgtttgcgtcgattccgctgcccgtatttgccggcatgtactgtctcttcttcgcatatgttggtggcgttggcctgagcctccttcagttctgcaacctaaacagctttaggaccaagttcatcatggggttcgctttcttcatgggcctatcggttcctcagtacttcaacgagtacacagccgttgcaagctatggtccggtgcacactggcgccagatggttcaatgacatgatcaacgtgccattcacgtcgaagccgttcgtcgctgggttggtagcctatatcctggacaacaccctccaggtaaaggagagcgcggtgcggaaggacaggggcaaccactggtgggagaagttcaggagcttcaagaaagacgcgaggagccaagagttctactcgctgccgttcaatctgaacaagttcttcccgtcggtctgatctcaaatggcgccgccgctgaatcaattctggaagcaacccttgttcatatgggcgttaatgaggaacataattctgctggtctggccagtggaagcttctgtgtctccattgttggtcaattttgtgtgttttcggacgagatgggagtaattgaactgtagaaattattacgattgaagtatatcgcgttctttttgtaatctaaaaaaaaaaaaaaaaaaaaaaaaaaaaaaaaaaaaa

SEQ ID NO: 331 - DNA, 2071 bp, Zea mays
  CDS (34)..(1632)
ccacgcgtccggaaagggaaggcgaggaggaggatggccggaggaggggcggcgacgccgccgaagcaggaggagctgcagccacacccggtgaaggaccagcttcccagcgtgtcctactgcatcacaagcccaccgccctggcctgaggctgtcatccttggattccagcactacattgtgatgctgggcacatccgtcatcataccaagtgctcttgttccccagatgggaggaggaaacgaggagaaggcccgggtgattcagacgctgctgttcgttgccggcatcaacaccctatgccagtcattctttgggactcgcctcccagcggtgatgggtggatcctacaccatcgtcgcacccaccatttccatcatcatggccggccgttacagcaacgaagcagaccctcgtgagaaattcttgcggaccatgcgaggaacacaaggcgctctcatcatcgcgtcgacaattcagatcgtgcttggtttcagtggcctttggcgcaatgtcgttaaattgctgagcccattgtctgctgtacctctggtttcgctagctggatttgggctatatgagctaggttttccaggggttgctaagtgtgtggaaattgggcttccggaaatcatcctaatgctcatattttctcagtacttacctcatgctgtccatgcggcaaagcctgtgttcgaccggttttctgtgattttcacaattgcgattgtatggctgtatgcgtacattctcacggttagcggtgcctacaagaatgcccgaacaaagacacaactccattgccgagttgaccgctctggacttgttggtggagctccttggattagtgtcccatatcctttccaatggggggccccaacatttgatgctggtgaatcatttgcaatgatggtggccgcatttgttgctcttgttgagtcatctggggccttcattgctgtgtcaagatatgcaagtgcgactatgatacctccttcagttcttggtcgtggcattggttggcagggcatcggtactttactgggtgcgttttttgggacagctaatggaactgcagtgtcagttgagaatgctggtctgcttgctttgacacatgttggcagccggagagtagtccagatatctgcaggcttcatgatcttcttctctgtccttgggaaattcggggcgatctttgcttcaatcccactgccgatattcgctgccctgtattgcattctctttgcatacattggtgcttgtggcctgagcttccttcagttctgcaacctgaacagcttcaggaccaagttcatcatggggttctccttgttcatgggcctgtcagtaccccaatacttcaacgagtacacgtccgtggctggctatggccccgtgcacaccggcgcccgatggttcaacgacatgatcaacgtgcccttctcgtcgaagccgttcgtggctgtgctggtggccttcttactggacaacacgatccaggtgcgtgacagcggcgtgaggagggacaggggctaccactggtgggacaagttccggagcttcaagacggacagccgcagcgaggagttctactcgctgcccttcaacctcaacaagtttttcccttccgtctgatcctgcagggtctgcacactcttcctcgcagccgcagtagctcgggctggagtcaggcaagaaatgatcctatgcagatgatgctggagcatggactgatggcgttttgtacattcaggggtgaactgaactgtgcaggttgcaggggatagtgctctgggtagcatcagtattccctagtaaccgaaattgaaaaggccgcctgttaaacttctgcaaacactagcatgattacgtctcctagtgctactgttgtttagattggaaaacatggaactcaacggtaagcatagatttaccttgaagcaacccttttcttttgcttagaaagaatttgtgttggggatttttttttcaccatgtaagaactgagagcacttagattacaagggagggtgaataggtgatcctgcaaaaaaaaaaaaaaaaaaaaaag

SEQ ID NO: 332 - DNA, 3154 bp, Zea mays
  CDS (176)..(2836)
ctcgtccaatgagcgggacggggggcggtgagactagagagtggtggtgttcgagcagctgaaatgcacccgcgaggggctgagctccagcgagggccagcagcgtctcgagatctttggccccaacaggctcgaggagaagaaggagagcaaggtcctcaagttccttgggttcatgtggaacccgctgtcatgggtcatggagatggctgccatcatggctattgcactcgccaacggtggtggcaagcccccggactggcaggacttcgtcggtatcatcgtgctcttggttatcaactccaccatctccttcattgaggagaacaatgccggcaacgccgccgccgcactcatggccaaccttgctcccaaaaccaaggttctgagagatggccgatggggcgagcaagaggctgcaatcttggttcctggtgacatcatcagcatcaagcttggcgatatcgtccctgccgacgctcgtctcctcgagggtgatgcactcaaggttgaccagtctgcgcttactggagaatccctcccggttaccaagggcccaggggacgaagtcttctcgggttccacttgtaagcagggtgagatcgaggccgtggtcattgccaccggagtgcacaccttcttcggcaaggccgctcatcttgtggacagcaccaaccaggtcggacacttccagcaggtgctgacagcaatcggtaacttctgcatctgctccattggggtcggcatcctcgtcgagatcatcgtcatgttcccaatccagcaccggaagtaccgcagcggaatcgagaacctgttggtcctcttgatcggtggtatcccaatcgccatgcctaccgtgctttcagttaccatggccattggttcgcacaagctgtcacagcagggtgccatcactaagaggatgactgccattgaggagatggctggtatggacgtgctttgcagtgacaaaaccggcacactcaccctcaacaagcttagcgtcgataagaacctcgtcgaggtgttctgcaaaggcgtcgacaaagaccatgtgttgctgttggctgcaagggcttcaaggactgagaaccaggacgctatcgatgccgccatggttggcatgcttgctgatcctaaggaggccagggctggtataagggaaatccacttcttgcccttcaaccctgttgataagaggactgctctgacgtacattgatgccgatggcaactggcaccgtgtcagcaagggtgctcctgaacagattcttgacctgtgccactgcaaggaggatctgaggcggaaggtgcactctattatcgacaagtatgccgagcgtggtcttcgttcgcttgctgttgccagacaggaagtacctgagaaaaacaaggagtcccctggtggaccatggcagttcgttggtctgttgcccctgtttgatccgcctaggcatgacagcgctgagacaattcgcaaggctcttgttcttggtgttaacgtcaagatgatcacgggtgatcagcttgctattggtaaggagactggaaggaggcttggcatgggtaccaacatgtatccatcctctgcgctgctcggccaaaacaaggatgctacgcttgaagcgcttcctgtagatgagctcattgagaaggccgatggttttgccggagtcttccctgaacacaagtacgagatcgtgaagagactgcaggagaagaagcacatcgttggtatgactggagatggtgtcaacgatgccccggctcttaagaaggctgacatcggtattgctgttgcggatgctactgacgctgcgaggagtgcttccgatattgtccttactgagccaggtcttagcgtcattatcagcgccgtcctcaccagcagatgcatcttccagaggatgaagaactacaccatctatgcagtttccatcacaatccgtatagtgctcggatttatgctcattgcgttgatctggcaatacgatttctctcccttcatggttcttatcattgccattctcaatgacggtactatcatgaccatctctaaggacagagttaagccatctccgttgcccgacagttggaagctgaaggagatctttgctacgggcatcgtgcttggaagctaccttgctctgatgactgtcattttcttctgggctatgcacaagaccgacttcttctcggacaaattcggtgtgaggtcgatcagggacagcgagcatgagatgatgtccgccctgtacctccaagtcagtatcgtgagccaggctctgatcttcgtcacccgttcccgtagctggtccttcgtggagcgccctggtctgctcctggtcaccgcgttcctgctcgctcaacttgttgccaccttcctcgctgtctacgccaactggggcttcgccaggatcaagggtatcggctggggctgggcaggtgtggtctggctctacagcatcgtcttctacttccccctggacctgctcaagttcttcatccgcttcgtgctcagcggcagggcatgggacaacctcctcgagaacaagaccgccttcaccaccaagaaggactacgggcgggaagagagggaggcgcagtgggccaccgcgcagaggacgctgcacgggctccagccgccggaggcttcctccaacacgctgttcaacgacaagagcagctaccgcgagctgtccgagatcgccgagcaggccaagagacgagctgagatcgcgaggctgagggagctcaacaccctcaagggccacgtggagtcggtggtcaagctcaagggcctggacatcgacaccatccagcagaactacacggtgtgagagcccctctgctgcgatgtcgacgacaacacctttgctgcccgacgggagccatctgattacagataaaaattttcctagctgtaaagctctctataccaccagatactgccatatgatggtatggttgggtacccgtctttctagggagtttcttttctctctctcttttcttattgttatgtttttcaatagtggagtgtgcgcgtgttgtaatcgtttttacctgcgttttcctctaactagccggtgatctcgcgggaagcgaggtgaagaaataatgcaactaaaattctctgccaaaaaaaaaaaaaa

SEQ ID NO: 333 - DNA, 2253 bp, Zea mays
  CDS (222)..(2168)
ccacgcgtccgggggattccacatcgtaaccactgaagacgaggcggcggacgagacggagagcagaaccgcgcagcgaagcagcagcggcgacaagccctcgcgtcggtagaggcgccgtccgccgtccgccccctcaactccggtagccgctggccgctgcaggtcgagtcccgtcgagccgactcgcgcttcccgatctgggtggccgcggcgccggcatggcgcggttcgaggtgaacggcaagtcggtgcaaggcgtggacttgctgcggcggcgccactggccgtcgcgcctcgacttctggcccttccttgcactctatgcgctctggctgctgcttgctgtcccggcgctcgacttcactgacgctctcatcatccttgccgcgctctccgctgctcacattctcaccttcctcttcaccgcctggttcgtcgatttccgtgccttcgtcgggtactctaaggtcaaggatatccatgccgctaacacgtgtaaggtgactcctgctaagttctcggggtcaaaggagattgtacctctgcacaaacagaaaaatgtggcctcaacttcagctgcaggtgagacagaggagatttactttgattttcggaagcagaggttcatctactcggctgagaaagataactttttaaaactccggtacccaacgaaggaattgatcggtcattatggcaagggcactggttatggaactgaggccaagattagcaccgcagtggacaagtggggcagaaatgtattcgaatatccacagcccacatttcagaaattaatgaaggagcaaatcatggaaccattttttgttttccaggttttttgtgttgctctatggtgcctggatgcgtattggtactacagtttgtttacacttttcatgcttttcctgtttgagtctactatggcaaagaataggctgaagacattgactgagctaagacgtgtgaaagttgatagccagattgtgttgacctatagatgtgggaaatgggttaaagtccctggaactgaactactaccaggagatattgtgtcaataggccgctcaactagtggtgaagatagatctgtaccagcagatatgctattgttagctgggtctgcaatagtaaatgaagctattcttacaggagaatctactccacagtggaaggtttcaattgctggacgtggtcctgatgatatgctatctataaggcgagataagaaccatatcctatttggtggcactaaagtattgcaacacactgcagataagtctgtaaatcttcgatcacctgatggtggctgtctagcttttgtattgaggactggatttgagactagccaagggaaattgatgaggactatcttattttcaactgagagggttactgcaaataacaaagaaagtggcctgtttatactctttttgcttttctttgcaatcattgcgtccggttatgtgcttgtgaagggattagaggacccaacaaggagcagatataaacttttattgagctgttcgttgattattacttctgtgataccaccggaattgccaatggagctctccatagcagtcaatacatctttaattgcattggctcggcatggtattttctgcacagagccattcagaataccatttgctgggaaggttgacatatgctgctttgataagacagggactctgacatcagatgatatggaatttcaaggtattgttacatcggaaggtgatgacttaatatctgatgcaaataagctgcctctccgaactcaagaagtgctttccagttgccatgcactggtatttgttgacaacaagctggttggcgatcccctagaaaaggctgctataaagggcatagactggatctacacatctgatgagaaggccatgtccaaaaagcctggtggtcaacctgttcaaattgtgcacagataccattttgcttctcacttgaagagaatgtctgttatcgtccgtattcagcagaaattttacgctttcattaagggtgcaccagagaccatccaagagaaattagttgatttacctgctgcatatgtggagacatataagaaatacacacggcaaggttctcgggtcttggctcttgcatataaattgcttcctgagatgcctgtaagtttctgttgatattaatcatgtttgcctatagcctttcttatctagtattctgttattcttttgtcaaaaaaaaaaaaaaaaaaaaaaaaag

SEQ ID NO: 334 - DNA, 4406 bp, Saccharomyces cerevisiae
  CDS (170)..(4237)
tttgccagaaaacccaaatctgtttattgccactaagttgaagaaacatataatcaacaattgttggcaattctaaggggaatagtgcaacaagaagccagtaacgccaaatagaggttagcgccaagcaataatttactggtaggttctttcattccctgattttaccatgaatgacgacagagaaacccccccaaagaggaaacctggggaggacgacacgcttttcgatattgacttcttagacgacacgacttctcattctggatcccgttcaaaggtcaccaactcacatgcgaacggatattatataccaccaagtcatgtacttcccgaagagactatcgacttagacgctgatgatgataacattgaaaatgatgtccatgaaaatctatttatgagcaataaccatgacgaccaaacgtcttggaatgccaatagattcgactcagatgcatatcaaccacaatccctacgagcagtcaagcctcccggtttatttgctaggtttggtaatggtctcaaaaatgcctttacgttcaaacggaagaaagggcccgaaagtttcgaaatgaatcattacaatgcggtgactaataacgaattagacgataattatctagactcgaggaataagttcaacattaaaattcttttcaaccggtacattttaagaaagaacgttggcgacgcagagggcaatggtgaaccaagagtcatccacatcaacgattctctcgctaattcctccttcggttatagtgacaaccatatatctaccaccaagtataattttgcgacctttctgcctaaatttttgttccaagaattttccaaatacgctaatctgttttttttatgtacatctgccattcaacaggtgcctcacgtctcgccaactaatagatacaccacaattggtactttattagtggttttgattgtttctgccatgaaggaatgtatcgaagatatcaagagagctaattctgataaagaattaaataattcgacagcagaaatattttcagaagcacatgatgactttgttgagaaacgatggattgatattcgtgtaggtgacataattagagtaaaatcagaggaacctattcctgctgataccataattttgtcatcttcggaaccggagggtctttgctacattgaaactgccaacttggatggtgaaacaaatttgaaaatcaaacagtcgagagtagaaactgccaaatttatagacgttaaaactttgaagaacatgaacggaaaagttgtttccgaacagccgaactctagcttgtatacttatgaaggtacaatgactttaaatgatcgtcaaataccgttatctcctgaccaaatgattttaagaggtgcaactttaagaaatactgcatggatatttggtttagttatcttcactggtcatgaaactaagttattgcgtaatgctactgcaaccccaattaaaagaaccgcggttgagaaaattatcaacagacagattattcgattgttcacagttttaatcgtgctaattttaatttcttcaattggtaatgttattatgtctactgcagatgccaaacatttatcgtacctttacctggagggtaccaacaaggctggcttattcttcaaagactttttaacattttggattctattttcgaatctagttcctatttctctatttgtcaccgttgaattaatcaaatattatcaggcttttatgataggttcagatctagatttgtactacgaaaaaactgataccccaactgtggttcgtacatcctctttggttgaagaacttggtcaaatagaatatatattcagtgacaagacaggaactttaacaagaaatattatggaatttaaatcctgctctattgcaggccattgctatattgataaaatacctgaagataaaacggccactgttgaagatgggattgaagttggttatagaaaatttgacgatttgaagaaaaagttaaatgatccctctgatgaggattcacctattatcaatgacttcttaacattactggctacctgtcatactgtcattccagaatttcaaagcgatggatctattaaatatcaagcagcctctccagatgaaggtgccctcgttcaaggtggtgcagatttagggtataagtttatcatccgtaaaggaaactctgtaactgttttattggaggaaactggcgaggaaaaagagtatcaactacttaacatttgtgaatttaattccaccaggaagagaatgagcgctatatttagatttccggatggttcgataaagttattctgtaaaggtgctgatactgtcattctggaaagattggatgatgaagctaatcaatatgtagaagctacaatgagacatttagaagattatgcatctgagggtttgcggacgttgtgtttggcgatgagagatatctctgaaggagaatatgaagaatggaatagcatttataatgaggctgccacaacattagataacagagccgagaagctagacgaagccgcaaatctaatcgagaaaaatctaatattaattggtgcaactgctattgaagataagttacaggacggtgttccagaaactatccacacattacaagaagcgggtattaaaatttgggttttaactggtgacagacaggaaactgctattaacattggtatgagttgccgtttattgagtgaagacatgaatttgttgatcatcaacgaggaaaccagagatgatactgagagaaatttgttagagaagattaacgctctaaacgagcatcaattgtcaacacatgatatgaaatccttagcgctcgtcattgatgggaagtcattaggctttgccttggaaccagaattagaagattatttgctaactgtggcgaagctttgtaaagcggttatatgttgccgtgtatctccactacagaaagccttggttgttaaaatggtaaaaagaaagtcgtcttcactactgctagccattgcgagtggtgccaacgatgttagtatgatacaggcagctcatgttggtgtcggtattagtggtatggaaggtatgcaagcggctcgttcagctgatatagctcttggccaatttaaatttttaaaaaaactattacttgtccatggctcctggtcttatcaaagaatttctgtcgcaattttgtactctttttacaagaatacagcattatacatgacgcagttttggtacgtttttgccaatgccttttcaggtcaatccattatggaatcatggacaatgagtttctacaacttattcttcactgtttggcccccttttgtcattggtgtatttgatcaatttgttagtagtagattacttgagcggtacccacaattgtacaaattaggacagaagggtcaatttttctctgtttacatcttctggggatggattattaatggctttttccattctgcaatagtatttattggcaccatattgatttacagatatgggtttgccttaaatatgcacggcgaactagctgatcattggtcttggggtgtaactgtctacactacaagtgtcattattgttttgggaaaggctgctttggtaactaatcaatggacgaaattcaccttaattgccattcctggttccctcttattttggttaatattcttcccaatttatgcttctatatttcctcatgctaacatctcaagagagtattatggtgtggttaaacacacgtatggatccggtgtattttggttaactttgatcgttttaccaatttttgcactggtaagagattttctatggaagtactataaaagaatgtatgaaccagaaacgtatcatgttattcaagaaatgcagaaatacaatatcagcgactctaggccgcacgttcagcaatttcaaaatgccatcaggaaggtgaggcaagtgcaaagaatgaaaaaacaaagaggatttgccttttcacaggctgaagagggtgggcaagaaaaaattgtcagaatgtatgatactactcaaaagagaggtaagtacggtgaattacaagatgcttcggcgaacccctttaatgacaataatggactgggaagtaacgactttgaaagtgcagaaccgttcattgaaaatccatttgctgatggtaatcaaaattcaaatagattcagttcttcgagagatgatatttcatttgatatatgaggcacagaaacaaagagcagaagacaaaaaatacaaaaataaaaataagataaaaagaaaagtcattattaccattactgaaatatgtacatttaccataaaatatatccgttatatagaagttataatataagcctacactttgttatcggttttcattcctctgggg

SEQ ID NO: 335 - DNA, 4601 bp, Schizosaccharomyces pombe
  CDS (56)..(3832)
tatctttgctttttctgcgcatatcatttgcattgttaatatcttgtaaatatcaatggcccgagatgtagataataagcaaaatgctaaaaggatatcacgagatgaagacgaggatgaatttgccggagaatcgatggttggtagaacgttagacaatccttttctgggtgaagatgaattcgaagatatttttggctctgaaagccaatatatatcttcttcaggccaaaattctaccaatccattccttgctgatacaagaatagagaatagtcctttaggaagtgaaagtaaggccaaccaacttaataagcaaggtacaaacgtaaatcacattgagatacctttgcgcgattttaatgaccctacacaacctgaatctttcctaccacctcctaagaatacatttacttcgcgtataaaaaaaataaagaacttatttaaaaaagagaagaaacaggttaagccagaagatcttggtcctcgacagatcattttaaatgattattcagcaaaccatttcttacacaacgctgtgtcaacttgtaaatacagcgctttcacatttttaccaaaattcctaaaggaacaattctcaaaatatgcaaatctatttttccttttcacggctgttgtgcagcaaattcctggaatcacaccagttaatcgttatacaacgattggccccatgttaattgtactttcagtttctggtattaaagaaatcatggaggatataaagcgcaaaaaacaagatcaagaattgaatgaatcgccttgctacgttttacaggggactggttttgttgagaaacaatggaaggatgtagttgttggtgacattgttaaaatcgtttctgaaacttttttccctgctgacttagtacttttatcatcatctgagccagagggactatgctatattgagactgcaaatttggatggcgaaactaatttaaaaattaagcaagctctcccagaaacagcaggtcttctaaaaccagtagagcttggtcagctatcaggagaagttaaatcggagcaaccgaataataatttatatacttttgatgccactttgaagcttcttcccagtgatcgagaacttccattatctcccgatcagttattgcttcgtggtgctcagcttcgtaatacgccttgggtgtatggcattgttgtatttactggtcatgaatctaaacttatgaagaacactacagaaacacccattaaacgaacttccgtcgagaagcaagtgaactcacagattctgtttttattatgcatctttgtgtttctttgttttgcctcttcacttggagctctcattcatcgttcggtttatggatcagctttatcttatgttaaatatacttccaacagggccggcatgtttttcaaagggttgctgactttctggattctctactcaaatcttgtgccaatttctttgttcgttacttttgagttagtccgatatatacaggcacagctaatcagcagtgaccttgatatgtacaatgaggaaactgatactccagctgcatgccgcacatcttctctagttgaagaattgggtcaggttggatatatttttagcgacaaaacaggtacattgacgagaaatcaaatggaatttcgtcaatgcactatagccggtgttgcatatgctgatgttattcctgaagatcgtcagtttacctcagaagaccttgattctgatatgtacatatacgattttgatacgcttaaagaaaatctcaaacatagtgaaaatgcaagccttatacatcagttcttactagttctttctatttgccatacggttatcccagagtatgatgaatccactaattcaattaaatatcaagcttcttcaccggatgaaggtgccttagtgaaaggtgctgcatccattggttataagtttctagcgaggaaaccgcatttagtgactgtaagtatttttggaaaagatgaaagttatgaactattacatatttgcgaatttaattctactcgcaaaaggatgtcaatagtttttcgttgtcctgatggaaaaattcgtttatacgttaaaggtgctgacacagtcattatggaaaggttagcatccgataacccgtacttacaaactacgattcatcatcttgaagattatgctaccgtgggtttacgtacgctttgtattgctatgcgggaagtcccggaagacgaatatcaaaggtggtcaacagtgtttgaaactgcagcctctagtctggttgaccgtgctcagaagcttatggatgctgctgaagaaattgaaaaggatttaatcttgctgggagctaccgctatagaagatagactgcaagatggagttcctgatactatctcaactttacaaacagctggaataaaaatctgggttctgaccggtgatcgacaagagaccgcaattaatattggcatgagttgcaagttgattgatgaagacatgggtttagttatagtgaacgaagaaacgaaagaggctactgctgaaagcgtaatggctaagttatcttctatatatcgaaacgaagctaccactggaaatgttgaatcaatggctttggttatagatggggtttcacttacttatgcattagattttagcctagaacgccgattctttgaactggcttctttatgccgtgccgtgatatgttgtcgtgtctcacctttacagaaggctttgatcgttaagatggttaaaagaaatacaggtgaagtgctattagctattggagatggcgctaatgatgtgccgatgattcaagctgcccatgttggggttggaatcagcggtatggaagggttacaagcagttcgaagctctgatttttcaatttcccaattttgctatttaaaaaaattgttacttgttcacggatcttggtgttatcagcgtctcagcaaacttattttgtactcgttttacaaaaacattgctctctacatgactcagttttggtacgctttttgcaatgcattttccggccaggtaatttttgagtcttggtctatttcactgtataatgtgctttttactgttcttccaccggtggtaataggtatatttgatcagtttgtaagcgctggtcaactttttcagtatccgcaactttatcaattaggtcaaagaagtgaattttttaacttaaaaaggttttggtcttggataacaaatgggttttatcattcacttcttctatttctttgttccattgctgtgttttactatgatggtcctaataaggatggtctcgcgtcaggtcattgggtgtggggtactacactttacgctgcaatactagctactgttttaggtaaggctgccttaattagtaatcattggactcaatacactgtaattgctaccctcggatctttcttgctatggatagtgtttatgcccatttatgctgttgcagcacccgctatcggattttcaaaggagtactacggaataattccacatctttacgggaatctaaaattttgggcttccctacttgttttgccaacaatagcactgatgcgtgactttgtgtggaaatattcatccagaatgtattatcctgaggagtatcattacgttcaagaaattcagaaatataatgtcacagactatagacctcgtattgtcgggtttcataaagctatcaggaaaataagacagatgcagagaatgcgtaaacagagagggtatgctttttctcaaggtgaagaggaccagtcaaggattttagatgcatatgatactacacatactcgtggagcatacggtgaaatgcgttagatacgtatttttctctattattttatattacattcgcttttggtttctagatctcagatttcgatgagttttacgatgttaagttgttttagtttatcactcgtttagaattattatgttattcatcctattaatcgattaacaagacgttttttctgtattactgtaagaatttcttaaagcataaagacgcattggtaccaccaaatccaaagctgtttgacaaagcaacattaatgcggctctctttagccacattcggcacataatcgcactgaaactgctgaggaatatcagagtattcgaaatttaacgtagggggtaagacgccctatacagttttgttagcaatagaaagtttgagtagaataaaataccttttggacagtcaagaccgtatagacagattcgattgcacctgctgctcctaaaagatggccaatagagcctttgctactagatacaggaaatgcctcaggattccggttcacatcacaaagtaacctagtaatcgctatgctttctgctacatctccaagcttggttgaagttgcatgagcattgatataatccaattgacttgcagaaagaccagcttgttttaaggaacgcttcatagcatagtaagcagcatccccatttggatttggagctgtaatatgatatgaatcagatgccaaaccataaccgactatttcagcatatatatgagcatttcgatttttggcatgctccaattcctcaaggactaaggcagcggagccttctc

SEQ ID NO: 336 - DNA, 6501 bp, Oryza sativa
  CDS (47)..(1538),(1619)..(1925),(3116)..(3824),(3920)..(4043),(4143)..(4362),(4590)..(5048),(5937)..(6153)
ccggtggtggcccactagccctgctcgctccggcttccccgactccatggcttccgggcgcccgctgctcgacgcctcgccgcggccgacgcagcagccgccggcgtcatcgctgctcccgccgccgcagccggagccgcccctccgagccgaccgcctcgcgttctccctcgaggtgcccgaccccttccgccgggagcccgacccgtcgtcggccgcgtcgcagcggggggaggaggaggggggcggcgaggaggagtcccgcgcggttgttgtcggggagccctcgtcttcggaggcggcggcggggttcgccgggaacggcgtacggacggcgaagtactcggtgctgacgttcctgccgcggaacctgttcgagcagttccggcggctgtcgtacgtctacttcctcgccatcaccgtgctcaaccagctcccccaggtcgccgtcttcggccgcggcgcctccgtgctcccgctcgccttcgtcctcttcgtcaccgccgtcaaggacgcctacgaggacctccgccgccaccgctccgaccgccaggagaacaaccgcctcgccagggtcctcctggcgccgcccgccgcgggggagttcgcgcccaagaaatggaagcacatccgcgtcggggacgtcgtccgcgtcgcctccagcgagacgctccctgccgacatggtgctcctcgccaccagcgacccctccggcgtcgcgcacgtccagaccgtcaatcttgacggggagaccaacctcaagacgaggtatgctaagcaggagacgcaactgaggttctcgcaggacggtggaatcggcggtgtccttcattgtgagcggccaaacaggaacatctatggatttcaggcgaatttggagattgatggcaagcgtgtctcgctagggccatcgaacattgtgctccgtggatgtgagctcaagaataccacctgggcgataggggttgttgtgtatgctggaaaggagaccaaggtcatgcttaatagctccggggcgccgtcgaaacggagccggttggagacacagttgaaccgggagactgtcatactgtccattatgctcattgggatgtgcacgaccgcaagtgtgctcgcggggatttggatactgaatcaccgtggggatttggaattcacccagttctttagggagaaggattacacgacagggaagaactacaattactatggcatggggatgcagatattcattacattcctcatggcggtgattgtatatcaggtcatcattccgatctctttgtatatatcaatggagttggtacggcttgggcaggcatatttcatgggtgctgacagagatttgtatgatgagtcatcaaggtcaaagttccaatgcagggccctgaatataaacgaggatctaggacagattaaatatgtattttctgataagacagggacgctgacagagaacaagatggagttccagtgtgcatcaattcggggggttgattactgttctggcaaagattcatgcggatactcagttgtaggtacgatgtctttaatgtatatttctggttttcatgttgaactttcctagtatggctgcttattttctggttttggacagtcgatgatctcctatggacacccaagatggcagtcaagattgatcatcggcttttgaagttactgaggggtggtggcacagatgaggaaacaaagcttgtcctcgaattcttccttgctcttgctgcatgtaataccattgtgccacttgtcctagatactcgtgattctaagcaaaagttgattgattatcagggtgagtcccctgatgagcaggcactagtgtatgctgcggcatcttatggcattgtgcttgttgagcgaacatctggttatgtggtgattgatgtccttggtgacagacagaggtaaggtagtctttcatcatttgctttatggacatgctaattttcaactctgcatgagtgtgttttcaataataattagtggcattatgcaatttagctaataccaattttggtgtatcaacatcattatgtgactaggagtggatgtctgctacagtgctagtgtgctacctgatccatgatgtttacatctctggaaaattatacctacaaaactttattcaactgcaatgtcatatagtcatcaacagttggtagcataacttattcaataacgattttcacaagtgttttatgcactttgctttatggtgtttagtgacgtcattcttttgtcttatcttattggtttgctggtgtgaatgctaactttgagttgtatcttgctagttatcttcctattcctattcttagcatacagttaatatttattcaaaataaaaataataatttggaatattttgggatgcaacgtgccaactccaaatgatttgtggcattaccccacatgagcgaaatttcagtacttagtttatcaggcttacctcttggagatatgttacaactctccaagtgcatgtcttgacttttccttgtgtttatagacatgcttgcatatcctattatagtaagctagtttgtggagccaatactgtaatatattggttgaatatatttgatgaatggagctctttttattggttaatcaccaactgtagagagttaaatgtgtttgctgtaagtccatgtcaaacacctgggctataggcaaaaccaagttaattatcactttgaacccagttattgtgatgagcacatatctgcactagggccataaatttgtaaggagctgcattgaacaggctggcatttataaacaaagcaaatttaggatgtgcatatggatttgcagctgaatttctggataatttggataaaaccatatcatttttcaccaaaccaaatgtttatctaacatttttaataacactattccaaaaggcattcttagttacctcatatgtacgaagtacgctagctttgtttataaatgcccgctttgttactacattgactactctgctccattctttcagttcgttgttctttatgtgtaaattttattttcaatatcttgtttacaagaatggcttatagttccaatttatcttctggtatgggatgtgcagatttgatatattaggacttcatgagtttgatagtgatcgtaagaggatgtctgtcatagttggctgccccgataagactgttaagctatatgtgaaaggtgcggacagttcattgtttggaattaccaaaaattcattagatctggacattgttcgtgctacagaggcacacctccacaaatattcatcgtttggtctaagaactctcgttattggcatgcgtgaattgagtcaacctgagtttgaggagtggcaattggcatatgaaaatgctagcacgtcagtacttggaaggggaaatttactccgatcagttgcggccaatatagagaacaatatccgcatattgggggctactgggatagaagataagcttcaagatggggttccagaaacaatagaatctcttcgacaagcagacataaaggtttggattttaacaggagataagcaggagacagcaatttctattggctactcttgtaaactgctgaccaatgacatgacacaaattgtgataaacaacaactcaaaggagtcttgtaagaggagtctcgaggaagcacatgcaacgattaagaagctcagaattgcttcaactggcacacagagtccagaattagcatcagaatctgctggtgtaactcttgcgttaattgtagatggtaacagcctggtttacatacttgagacagagttgcaagaagaggtactcatctaaatatgattcttttttttcatttcctttcatccttggtataaaatcatagttgatgcatggactttcttcttttgtttgtgtagcttttcaaagtggcaagagaatgtagtgttgtattgtgttgtcgggtggccccgttacaaaaggcagggatagttgcacttatcaaaaaccgaacagatgacatgaccttagcaattggtgatggtattattccctcctggttctgctattatggcatataatattctgtgagaaccaatttatgtacatgtgatatatgctaattaatcttttgttgttcaggtgcaaatgatgtttcaatgattcaaatggctgatgttggtgttggcatcagtggtcaagaaggacggcaggctgtaatggcatcagattttgcgatgggccaattcagattcttggtccctcttctattagttcatggccattggaattatcaaagaatgtcatatatgatcctctacaacttttacaagaatgcgacatttgtcttggttcttttctggtaagagcccttttgcattgaagttttcacactttgaaaaaaaaaactgtttttatgtagaaaattatctaaacgttactgtggaaacccccatgttagtaagacctagtgaaaagaagtggactctatttatgttcagttgaattaccaaagttgttgctttcttaatttttgcaatattcagagacattgtctccaaaatataacacttaattttgtgatctcaggtatgtactttatacagcattcactctgacaactgctatcacagaatggagtagccttttgtatactgtgctatatacatcccttccaacaattgttgttggtattcttgacaaggatcttagtaaggaaacactactagcttatccaaagctatatggatctggccaaagggatgagaagtataatgtaaatttgtttgtcctcaatatgctcgaagcgctatggcaaagtctggttgttttctacatgccatattttgcatatagacaaagtacgatagatatgtctagtctgggagatctatgggcacttgcccctgtcattgttgtaaatatgctactagccatggacatctttcggtggaattggatcgtacatgcttttgtgtggggaacaatagcagcaacaaccatttgcctctttgtgatcgactccatttggtttcttcctggatatgggtaagtacttcatttccagctttcttttatttataggcgaaccctcttttttttaaaatgttttggtgctaaaaatgtagtaaccaacctgatgtttggaactggcaatggctttttaaattctttcctgcaaggcattttgtaaatttcataactgtaaatttctgaaatatgtgttaatatcagttatcctaggaagtaaaatgacttttgagcttatgcaactgttatgggaggagctcctgagtactcttttcgtactcgtaaaggaagtcgtttaggataatgtttaagtcaaaccttgggaatataaatcatgaataactctcaagtcgttgagtttgaaaatgtaaaaattatataaatagatttgtcttgaaaaatactttcataaaagtatacatatatcacttttcaataaatatttttatagaaacaagaagtcaaagttgtgttacgacttcctttatgagtacggagggagtatgtggtctctattttctcatttgtagtattttgtgttgccttgttgctgttcacgttaatccttgtagagttcttttattcctaggaggatattgagaagtagagatatattcaagtggtaactatgatttattgagagggataagtgttcagattaagatatatagaaaattaacatagatgctgctacctctcaatatctcctatgtaaaagggataaaagttgtcctgatacatagttagattaaatgcctctttctttgcaagcatgtttgtgctacatccatcatgtaatgcgagcaccatgatcatgttttcttgaatggatctcctaaagtgaaataggagttctttttgcaatttcttgattgattgcatactgactcaatataactatttcagggccatctttcatataatggggacaggtttgttttggttactgctgcttatcattgttgttgcagcaatggtaccacattttgtaatcaaggcctttacagagtattttacccccagtgatattcaagttgcccgagagatagaaaaattcgagaatgtaaatcaggtgaaccgttcagaagttccaatgacacgtctgcatgacccaaggagatagctatagaaaattctcctttatagaaatttctttttttttctgttgtttttcgcctctttggtgtgtatacgagtaaattcatttagcactaaggtgataggtttagcctccaagatgtatgtatgtaggcatgtgttcatctaacatttactgaaaaggaaatataaattgtttgatgtatgcaagtttctcatccttgtgtcgaccagcacaactgtaaggtgaagagtgttatatacctatattacctcttactctatcactacgatgatcctgtcctattgcataagctgatttatctttgtatttttagtttcttagcttcagtttattcatgctatctgtcac

SEQ ID NO: 337 - DNA, 1101 bp, Saccharomyces cerevisiae
  CDS (110)..(1042)
ttatttagatcgtgattctctctactcaaacatttccttgaacttgtataacggggaaataaatctgaaaagcaatacatttgcgcactgttaaaactggaaaggaagaatgacaaccagcatactcgatacttatcctcaaatatgctcccccaatgctttgccaggtactcccggcaatttgactaaggagcaagaggaagcgcttttgcaatttaggtcaatcttgttagaaaagaattacaaagaaaggctggatgattctacgctattgcgatttctacgggcaaggaaatttgatatcaatgctagcgttgagatgtttgtagaaactgaacgatggagggaagaatacggtgccaacactattatcgaggattatgaaaacaacaaggaagccgaagacaaagaaagaatcaaattggccaaaatgtaccctcagtattaccatcacgttgataaggatgggagaccattgtacttcgaagaactaggaggaattaacttaaagaaaatgtacaagatcactaccgaaaaacagatgctaagaaacttagtcaaggagtacgaattatttgccacgtaccgggtcccagcgtgttcgagaagagctggctaccttattgaaacttcgtgcactgtgctggacttgaagggtatctcactttctaatgcttatcatgtgctttcctatattaaagatgttgcagatatcagtcaaaattattatcctgaaagaatgggtaagttttatattatacacagtccatttggtttctcgacgatgttcaagatggttaaacccttcttggatccagtaaccgtgtcaaaaatctttattcttggctcttcttataaaaaggaattattaaaacaaattccaatcgagaacttgcctgttaaatatggtggtacatctgtcttgcacaaccctaatgataagttctactattccgatattggtccctggagagaccctagatacatcggaccagaaggtgaaattcccaacatttttggtaaatttactgttaccagctaactatgatacaggccttcgtcgtagctttccgtgaatatagcatgcatactctataatat

SEQ ID NO: 338 - DNA, 1882 bp, Zea mays
  CDS (57)..(1037)
ctcgtcagtcctcagtcctcactttcgggccgagctccggatatccagcggcggcaatggcagccgaagccagcgccgtccagcagctcgctggcctcctggaccaagtggacgcgccgctgaagaagacatttgagaatgtgcatcagggctacccaacagagacattattgcgtttccttaaagctagagagtggcatgtgaataaggctcacaggatgcttgaagattctttgaattggaggatgcaaaatgaaatcgatagtatattggagaaacctattatcccagtagatttgtatagatcaattcgtgatacacagcttattgggttatcaggatactccaaagagggcattcctgtatttgcagttggtgttgggctgagtacatatgacaaagcttcggttaactactatgtgcaatctcacattcagatcaatgagtaccgagatcgttttattttgcctacagtgacaaagaagtatgggagacctattaccacctgtataaaggttctcgatatgactggtctgaaattgtcagcactacaccaaatgaagattgtgactgcaatatctacagttgatgatttgaattaccctgaaaagactgagacctattatatagtaaacgctccatacatattttctgcatgttggaaggtcgtgaagcctctgttgcaagagagaacaaggaagaaagttcatgtgttgcgtggctgcgggagagacgagcttctacagatcatggactactcctccctcccccatttctgcagacaggagggctcgggctcatccaaacattcgtcaggcgacgccgataactgcttctctctcgaccacccgttccaccaggagctctacagcttcatccaggagcaggcgctgaaccaggagctcatcaagcagggctccttgcacgtgaaaatccccgagcaggaccctgaggacgcaaagatcgtggaggtcatcgaggccgagttccacaagcttggcgtgcagaacgggtccgccaatggcatcgaccaagcatagcacctttgtctaataaggccagcctgattcaaccgagacgttgcttgccacttctgatgcaactaatcctactgtttattttttttggtggggtgggcccacccccgttgctgtttcctggggggaggggggtgattggtattggtggtatacatagcaaagtcatttgcagatccatccatgatgcaggactgagatagacgatatcacctgtgtaaacttgcagatttgcaatgtgtcctcatctcatatgtatgctgagttgagatgaaatgaataaatcatcctacaagtttttttaaaaaaaaaaaaaaaaaaaaaaaaaaaaaaaaaaaaaaaaaaaaaaaaaaaaaaaaaaaaaaaaaaaaaaaaaaaaaaaaaaaaaaacaaaaaaaaaaaaaaaaaacaaacaaaaaaaaaaaaaaaaaaaaaggggggccccttttaaaggaaccaattttacttcccccgcgttgcgaatttataaatttttttttgggcccaaaaaattaaatttatgggccgtttttttataaccgggtggggggataaacccgggggtcccccatttaaaacttttgaaaaaaacccctttttacaggttgggggataaaaaaagagcccgacattaaccttttcaaattttgggcaccaaaagggaaaggacccccccttaccccgaattaaacgcggggtttggggttttctcccaaggtgcccttaacttttaacccctaaagccctttcttggtttctttccttttttttccaagttggcggtttttccccagaaattaaagaggccctttgggtctgttaatttttaagccccacccccaaaa

SEQ ID NO: 339 - DNA, 1066 bp, Zea mays
  CDS (89)..(841)
gttccgatcctccacaccagcacccgccgccgccgcctcttcccttgcgcacctgctgctgtgcggatcggtgaggcggaggagtaggatggcgagcgcggccggaggcggagcggcgggggaaggggagtggcttaaggtatcccagctcaggcccatggtggaagcgcaggaccccaacgccaaggcagtggacaacctgacgctgcgtcggttcctgcgcgcgcgcgaccacgacgtggacaaggcctccgccatgttcctcaagttcctcaagtggcggagggaggcggcgcccggcggctccgtgccggaggagcaggtgaggagggagctgtcgcaggacaagctgtgcatgggcggcgtcgacagggccggccgccccatcctcgtcgccttcgcggccaggcacttctccgccggccgtgacatggcagagttcaagagttttgttgtctacttcttcgacaagatctgtgccagaatccccagagggcaggagaaattcctctgcatcgttgatctcaagggctgggggtactcaaactgtgacgtccgggcatacattgccgctatagagatcttgcagaactactacccggagcggctcggcaaggcgctgatgatccacgtgccctacatcttcatgaaggcgtggaagatgatctaccccttcatcgacaccaacaccagggacaagttcgtgttcgtggaggacaagagcctgcaggagacgctgcggcgggagatcgacgaggggcagctcccggagttcctcggcggcaagatggacgtgatcccactcaaggactatggcgtgcagcagcagcctcaggccgtgtaatagccatgccatgcgtagcatacacgagttgtggctaggagcatagcatggcaataactgtgtagctgctgtgaaagtgaaaatgaaacgttgcgctgtttagccgggtcaattgaccagcccaactgcagatctctgggctaccactatgaacagcaagaactgtttcccttatccttttcagccaaactaatcaaaccagaaaatgtttcttgtaaaaaa

SEQ ID NO: 340 - DNA, 1407 bp, Zea mays
  CDS (309)..(1196)
cgagattcgagagaaatggcgatggcgacgccagctgccaaacaatcacttctcaccgtccaaccgtgcacaatgaattgaagcgccacgcggttccaataatctattgccacgggcaggtgcgtcgcgtcgattcctggtcttcgagaggagcggaggaggagggcggcgagtgcggaggagaggcgagttcagctgtagcgtttcgcttcttgcccgtggcggcggcggtgccacctcgaacgctgctccctgttctggggcttactgcggatcctgatctgagcatcattcagagaggaagaaatatgtttaggagaaagcatggctctgatttcaactcagatgatgctgagcaaagagaagcaaagattagtgaactgaaagctgctcttgggactttgtctgcccgtggcgagaagtactgcagtgaagcatgcttgagaagatatctggaagcccgtaactggaatgttgctaagtcgagaaaaatgttggaagaaagtctcaagtggagggcagcttacaagccagaggatattcgttggcctgatgtttctgttgaagcggaaacaggtaaaatgtacagggcaagtttccgagacagggagggcagaactgttgttgtcatgaaacctacaaaacaaaatacttcatcccatgaagggcagatacggttcctagtatatactttggagaatgcaatcttcagcctgcctgaaggccaagaaaaaatggtatggctgattgatttcacaggatggacagtgtcccatgcttcgccgataaagacttgtagagaaactgcaaatatactgcaaaatcattttcctgaaaggctggccattggatttctatttaatccccccaaagtatttgaagctttttataaggtcatcaagattttcctcgatccaaaatcagtcgagaaggtgaacttcgtgtacgagaaggatgaggagagcatgaaggtcatgtacaaatacatcgatccggaagtccttcctgtagagtttggggggaagagcaatgtggtgtacaaccacgaggagtactccgagttaatgagacaagatgacatcaaaacagcaagcttttgggcggttgatgcgaaaactaaccatgctaaccctgccatcaatgggaccttggttcctgaggttgcgccacagtcgtcgctggctgctaaagctagttgaagagtatctgcattctctgagaaaattgagaagccgaggactaatggaaccttgagagaaacatatgaaataagaaacatggtatactcgttcatcctcaagagttgtttaagtactggaagtttattcagcacacaataagctactagagaatgtcaccatgtgtgatttgatgcccaaaagagatggtttacaaggtagaaaaaaa

SEQ ID NO: 341 - DNA, 1147 bp, Glycine max
  CDS (209)..(976)
attcggctcgagggggaagaaacatttaatttgggttgataatagtttatgttaagatatcactactgctatatatatgttgccatagccaagttagccttataaagggaaactcacttgccttatttttggttttgagattgagctaaaggccaactcaaccatcgaatttgttggtgattgaaagagaaggaagaagaagcaggaaatggaagcagtgagagctggtcgagaaggagcaataggtctaggtcaaggtgatggcgtagccaaggacagcactgagactgaactcaccaaaatccgtctcctcagggcaattgttgaaacccgtgatccctcttccaaggaagaggatgattttatgattagaagattcctgcgtgctcgtgatttagatgtagagaaggcttcggcaatgctcctcaagtacttgaaatggagaaattcatttgttccaaatggctctgtatctgtgtcagatgttcctaacgaacttgcacaagataaggtgttcatgcaaggacacgacaagataggtcgacctatacttatggtcttcggtggaagacattttcagaacaaggatggtcttgatgaattcaagcgatttgttgtttatgttcttgataaagtatgtgcaagtatgccacctgggcaagaaaagtttgtcggtatagcagaacttaagggatggggatactcaaacagtgacgtgcgtggatatcttagtgctctatccattttgcaggattactacccagagagattggggaagttgtttattgtgaacgcaccatacatctttatgaaagtgtggcaaattgtttacccattcattgacaacaaaaccaagaaaaagatagtatttgtggagaaaaataaggtgaaatcaacactgctagaagagatggaggaaagtcaggtcccagagatattcggtggctcactgccattagtcccaattcaagatagctaattaattaagtaaccgctgacagaataaggagaggcgggcctaaaaataaatattgttatttcttatttatgtgtttctatgccgttttctttttacccaattactttacactgttgtatcagctatcaatattcagtagtaaatgagtacgaaaaaaaaaaaaaaagg

SEQ ID NO: 342 - DNA, 2438 bp, Zea mays
  CDS (184)..(2214)
ggcctcctccctgagacaatccccacgccaccgcgcaccggagacgaacctgaggagagaaaaaatctgcgcccgtcagtgtgctcgcctacttctacgctccgctcgttcccccaaatagttcctcggcttcgctcccttcccctccctgctccggctccggttcgcacacagtaagaaaagatggcgctgccatccatgagtcttgtggcaaagggtgtgcttcccttctcagcacgtacctcgagtggtgtcacacaaaggccggtgtcagtgactgcttccttggagcacaaaaccagcgatgccagaaggaagttcctaaaacttgcgcttgggaaccttggagttggactgcccaccttgttgggcgctaagaaagctctcgctgatgagcaaggcgtctcgtcctcgaggatgtcttattcgaggttccttgagtatcttgacaaggatagagtgaagaaggttgatttgtttgagaatgggacaattgctattgtggaggccatttctcctgagcttggtaaccgcgtgcaaagagtccgtgtgcagcttcctggtctaagccaggagcttcttcaaaagttgagggagaagaacatcgattttgctgctcacagcaaccaggaggactctggttctcttctgttcaaccttattggaaatttggcattcccgcttatccttatcggtggtctgtttttactttcaagaagggcacagggtggcctcggtggacccaatggtcctggctttccccttggttttggtcaatctagggccaagtttcagatggaacccaacactggtgttacatttgatgatgttgctggtgtcgatgaagcgaagcaagacttcatggaagtggttgagttcttgaagaaacccgaaaggttcactgctgttggtgctcgcattcctaagggtgttctgcttgtcggtcctcctgggacgggtaaaactttgcttgccaaggcaattgcaggagaggctggcgtgccatttttctcaatttcaggttctgaatttgtggagatgtttgttggtgttggagcttccagagttcgtgaccttttcaagaaggccaaggagaatgctccttgcatagtgtttgttgatgaaattgatgctgttggaaggcaaagaggtacaggtattggtggtggaaatgatgaaagggagcagactctcaatcaactactaactgagatggatggtttcgagggcaacactggaattattgttattgctgccactaaccgggctgacatattggattccgctttacttagacctgggcgttttgatagacaggtgtctgtcgacgttcctgatgtacgtggaaggacagagattctaaaagtgcatggtagcaacaagaaatttgattctgatgtttctcttgatgtcatagcaatgagaacacctgggttcagcggagcagacttggcaaaccttctgaatgaagcagccattctggctggaagacggggaaggacagcaatttcttcaaaagagattgatgattctattgacagaattgtagctggtatggaagggaccgtgatgacagacgggaagagcaaaagtcttgttgcttaccatgaagttgggcatgcaatttgcggaactttgacgcctggccatgatcctgtccaaaaggttaccttagttccaaggggtcaagctcgtggtcttacatggtttatcccgatggatgacccaacactcatctccaggcagcaactttttgccagaattgttggcggccttggtggtagagctgctgaggaggtcatatttggagagcctgaggtgaccactggagctgctggtgacttgcagcaaattactggcttagccaagcagatggtggtgacattcggtatgtctgaaattggtccatggtctctgatggagggtggagcgcagagtggggacgtcatcatgagaatgatggcaaggaactccatgtcagagaagctcgcggaggacattgattcggccgtgaagcagttgtcggatgaggcctacgagatcgctttgaggcacattagaaacaacagggaggccattgacaaaatcgttgaggtgctcattgagaaggagacagtgaccggagacgagttccgggcgatcctttctgagtttgccgagatccctgttgagaaccgggttcccccagccacaccggcggctgcgctcccagcctaaaccctagccttgtaggggaggattttcttgttgtatggtgttcatattttggattcttggtgtactctaactctactaaatctgccggattttcggtactcgacatgtaagatgtaacttactcatggtgaattaatagtaaaatgtaattagattaaaataataggcctggcgcaacattttcagtttggaaaaaaaaaaaaaaaaaaaaaaaaaaaaaa

SEQ ID NO: 343 - DNA, 2712 bp, Zea mays
  CDS (104)..(2533)
acgcgggccgcatctcgcattctcgccggtgctgctgcaattaacgccgcctccggccaaccacccgaaacctacctccgccgccgtcgtcgccaccgtcaacatggcgagccaaggggagccctcggcctctgcttccgatccgaaggagaagaaggactactcgacggcgatactagagaggaaaaagtcaccgaaccgccttgtcgtcgacgaggccaccaacgacgataactccgtcgtcgcactgcaccctgacaccatggagaggctgcagctcttccgcggcgatactgtgctcctcaagggtaagaagaggaaagacactgtttgcattgtccttgcggatgaaacctgtgaggagccaaaggttcggatgaacaaggttgtccgccagaacctgagggtgaggcttggtgatgtggtttctgtccaccagtgccaggatgtgaaatatgggaagcgtgtgcacattcttccaattgatgatacagttgaaggcattacagggaacctgtttgatgccttcttgaaaccatacttcctagaagcatacaggcccgtgaggaaaggagacctcttccttgtcaggggtggaatgagaagcgtggaattcaaagtgatagagactgacccttctgaatattgtatcgttgccccagatactgaaatattttgtgatggggagcctattaagagagaggatgaggagcgtcttgatgaagttggttatgatgatgttggtggagttagaaagcaaatggcccaaatcagagagcttgttgagcttccactacgccatcctcagcttttcaaatctattggtgtgaagccaccaaagggcatattgctgtatgggccacctggttctggaaagactcttattgctcgtgctgttgctaatgagactggagcctttttctttctgatcaatggcccagagattatgtcgaagttagcaggagagagtgagagcaatctcagaaaggcatttgaagaagcagagaagaatgctccatctatcattttcattgatgaaattgattccattgcacccaagagagaaaagaccaatggagaagtagaacgtcgtattgtttcacagctactgactcttatggatggactcaaatctcgttcccatgttattgttatgggtgctacaaaccggccaaacagcatcgatcctgctcttagaagatttggaaggtttgaccgggaaattgacattggagttcctgatgaagttggccggcttgaggttctccgtattcacactaagaacatgaagctagctgaagatgttaatttggaactcatttcaaaggatacccatggatacgttggtgctgatcttgctgctctttgtactgaggctgctcttcagtgcattcgtgagaagatggacatcatagatcttgaggatgagacaatagatgcagagatattgaactcgatggctgttacaaatgaccatttcaagactgcgcttggaacaagcaacccatctgctctccgtgaaactgttgttgaagtcccaaatgtctcttgggaggatattggtgggctggagaatgtcaagagggagctccaggagactgttcaatatcctgtggaacatccagagaagttcgagaagtttggcatgtctccatccaaaggagttctgttttatggtcctcctggttgtggtaaaaccttgttggcgaaggcaattgccaacgagtgccaggctaacttcatcagtgtcaagggtcctgaattgcttaccatgtggtttggtgagagtgaagccaacgtccgcgaaatttttgataaggctcgccaatctgctccttgtgtcctcttctttgatgagcttgactcaattgcgacgcagagaggaagtagtgtgggtgatgctggaggcgcggctgatagagtgcttaatcagctactgaccgagatggatggcatgaacgccaagaaaactgtgtttattattggtgctacaaacaggcctgacatcattgatcctgctcttctgaggccagggcgtcttgaccagctgatctacattccactgcctgatgagcagtctaggctccagatcttcaaggcctgcctaaggaagtcccctgtggcaaaggatgtggacctgaatgctcttgctaagtacacacaagggttcagtggagcagatatcacagaaatttgccagcgtgcgtgcaaatatgcaatcagagagaacattgagaaggacattgagagggaaaggcggatgaaggacaaccctgaggcgatggaggaagatgaagtggacgagattgccgagatcaaagcagctcacttcgaggagtctatgaagtatgctcggcgcagtgtcagtgatgctgatatccgcaagtaccaggcgttcgcccagacgttgcagcagtcccgtgggttcggcagcgagttccgcttctcagagcagtcggcgacagctggtgctgctgcagccgatccgtttgcttcggctggtgctgcggctgacgatgacgatctatacagctaggtgtcctgttgggttggttctgggttgtgcaatatcagtctcatcagtcatctgtttaaaactctgattatacttagacacgggatgtcatgcaatgatatttgttttccgtacatttggacgttgagataatgcctgtttattttaaaaaaaaaaaaaaaaaaaaaaaaaaaaaa

SEQ ID NO: 344 - DNA, 1585 bp, Glycine max
  CDS (275)..(1345)
attcggctcgagtctgtctctttgctccatttcagtgctctgtcttctcccccaccaccgcactctctcagatattatcatttcatatcacacattcacatcctatcatcatcgacaacacgctatccccattgcttcttctcttctccctctctcgtttcctacttgacggcgccgtttcgttctccagaagatgcttctgagtacttcgcgctgcaactagacatgatgagttcaagtttcaagacatgggctgtgggatttgcacttggaaatgaaggagaggcaacgttggagagctgaagaggatgctttattacgttcttatgtcaaacagtatggtcctagggaatggaatcttgtgtctcagcgcatgaacacatatcttaacagggatgctaagtcgtgcttggagaggtggaagaactacctcaagcctggcatcaaaaaaggctctcttactgaagaagagcagcgccttgtcatccaccttcaagcaaaatatggaaacaaatggaagaaaatcgctgctgaagtcccagggcgcactgctaagcggttaggcaagtggtgggaagtcttcaaagagaagcagcagagagagaaaaaggagatcaatagaattgccgacccaattaacaatagtaagtacgagcacatactcgagagttttgcagagaaactagttaaggaacgcccttcaccatcatttgtcatggctgcttccgatggggcatttctgctcactgatacaccagcacctgcatcttccttgcgtccttcttggctttccaattctagtagtgctgcagccatcggcccaagttccctttctgtgaaactaagtctttcttcctcaacggtggccacacctccattttcatggttgccacccgagagaggaccagacaatgctccttttgttttggggaatgtatcagcgcttcatggagctattccaactctaagtgatagcatgcatatgtctcagatggtggagcactgtaaagagttgggagaggggcatcgtgctttggccacgcacaagaaggaggcagcttggaggttaagtcgggtggagttacagttggagtcagagaaggccaaccgaagaagggagaagattgaagaatttgaagcaaagattaaagctcttcaggaagaggagaaagctgctttaggtagaattgaagcagaatacagagaacagttagctgcattgaggagagatgctgaaaacaaggagcaaaagttggcagaacaatgggatgcaaagcatttacggtttactaggttactagagcaattaggatgcagagcagggctccttgagccaaatgcaagatgaagatatattttggcaaaatggatattggtgctcttctgactaaaattatatgcagtttgtgatcttggtatatttttattttagacgtgtatgaatttcctatctattcatacaacttgagtaacttccgttaacagttgaattacctgcatatggtatcacatccgagtttataaacttagttatattcctgaaaaaaaaaaaaaaaaaaaaaaaaaaaaaaaaaaaaaaaaaaag

SEQ ID NO: 345 - DNA, 1494 bp, Glycine max
  CDS (178)..(1260)
ctcggtttccactttctctctgtttaagaactcaccacttcttcaacttggtgccgttgtttcatggaccagaactacgcctcatagctcctttctcatttcacacacacaaagaaccttgagacatcatgaagattccaagttccaagcaactggttgtgggatttgcacttggaaatgaaggataggcaacgttggagagctgaagaggatgctttactacgcgcatatgtcaaacagtatggtcctagggaatggaatctggtgtctcagcgcatgaacacacctcttaacagggatgccaagtcatgcttagaaaggtggaagaactacctcaagcccggcattaagaaaggatctcttacagaggaagagcagcgtctagtcatcaaccttcaagcaacacacggcaacaagtggaagaaaattgcagcacaagtccctggtcgcacagcaaagaggttagggaagtggtgggaagtgttcaaagagaagcagcaaagggaaacaaaggggaataactgcaccattgacccaattaacgatagcaagtacgagcatatccttgagagttttgcagagaagctagtgaaagaaaggccttcaacatcaacatcaacatcatttgttatggctacttccaacagttcttttctgcatgctgatgcaccggctcctgcaccagccttgcttccgtcttggctttccaattccaatggcactgcacctgtgaggccaccctccccttctgtgactcttagtctttctccctcgacggtggcagcgcctcctccatggatgcagccccccgtcagaggacaggacaatgctagtcctcttgttttggggaatgtggcgcctcacggggctgttctagcatttggtgagaacatggtgatgtctgagctagtggagtgctgcaaggagttggatgaagtgcatcatgctttggccgggcataagaaggaggcagcatggcggttaagcagggtggagctgcagttggagtctgagaaggccgggcgaaggagggagaagatggaggaaatcgaagcgaaaatcaaagctctgagggaggagcaaacggctgcattggatagaattgaagcagaatatagggagcagttggcagggctgagaagagatgctgaaagcaaggagcaaaagttggctgaacaatgggctgcaaaacacttgcgacttactaagtttctagaacaggtagggtgcagatcaaggctcactgaaccaaatggaagatagagtgacatcaatcattcacaaattgggaaaatctagtttgcttttacttattattatgtcttgaatttatatgatatgaactttatagtcatagtagttttgttcctgtcatttttctaaaatatgttgttacatatggttattgatatcatccctatcttttcatacaacttgaggacttgcattagcggttgagttatgtttaaatataacatcctttatgaaaaaaaa

SEQ ID NO: 346 - DNA, 1547 bp, Zea mays
  CDS (92)..(1144)
gagagaatctaaagtgaccggacgctgtccttccttgctgatcggcgacacggtccatccctccctcgctcgctagggttccttttcgtccatggatcagagcttcgggaatctcggggccggagctgggagcagcagcgggggctccaactccaaggcggcggcagccgccgtgtcctcctcgtctttcctgcagctgccgctgtcgacggcgtcccccgcgtactacggcgcgccgctcgcgctcctgcaccacgccgccgcggccccgtcgtcgtcgcagcagcaccagcagcagcagcaccaccaccactacgccaggcacggcgccgagatgtcggcagcggaggccgaggccatcaaggccaagatcgtggcgcacccgcagtactcggcgctcctcgccgcctacctcgactgccagaaagtgggcgcgccgccggacgtgctggagaggctgacggccatggcggcaaagctggacgcgcgcccgccgggccgccacgagccgcgcgacccggagctggaccagttcatggaggcgtactgtaacatgctcgtcaagtaccgggaggagctcacccggccgatcgacgaggccatggagttcctcaagcgggtggaggcgcagctcgactgcatctccggcggcggcggctcctcctcagcgcgcctctcgctcgccgatggtaaatcagaaggtgttggctcttctgaagatgacatggacccgaatggtcgcgagaacgatccgccggagattgacccacgagcggaggacaaggagctcaagtaccagctgctgaagaagtacagtggctacctgagcagcctcaggcaggagttttccaagaagaagaagaaagggaagctcccaaaggaggccaggcagaaactcctccactggtgggagctgcactacaagtggccgtacccttcagagacggagaagattgcgctcgcagaatcaacgggcctagaccagaagcagatcaacaactggttcatcaaccagaggaaacggcactggaagccatcggaggacatgcctttcgtgatgatggaaggcttccacccgcagaacgccgctgctctgtacatggacgggccgttcatggccgacggcatgtatcgcctcggttcatgaactacacacttccatggacgactgtgggggcctatccaatcgtcggaccgtgggagtatatttcagtgttgcggtgcaaggacattgttgtggaatttttgttgctgattgccaaggggtgggtcggtcgatgtagcgtctatgcatggcttgtagttctcctgtaatgttgttgttaatttccgcttggcggcttgtaatctaggtgtatctctggaacttgaatcctgggtgattaatccggcaagcagctgcctgtttgtatgattgtatggttcgggttggtggaacatgatgcatgctaaggcgtggcctgtctggatcaaaaaaaaagaagatgtcttttgtaccagtggaatgattggaacttcagattgctgaacaaaaaaaaaaaaaaaaa

SEQ ID NO: 347 - DNA, 1214 bp, Glycine max
  CDS (103)..(1026)
attcggctcgaggtggcagcataaccagaaaaaggttccagaaattctggtaaggaacgaagcaaagcaaacgcagcgtttcgtttcgtgtcgctgctggttatggatggaatgtacggagtgccggcggagtacgccgacaaggctctcatgacgccggagaatctgattttcccgccggactaccaccacgacttcctcgccgccggccggattccgctgttcggatccgacgagttcttctcctcctccgccggaattcaccggcagcaggaagatgacgtggcagccaccactgtcatgaaggccaaaatcgcctctcaccctcactaccctcgcctcctccaagcttacatcgagtgtcagaaggttggggcgcctccggaaatcgcgcgcttgttggaggaaatccggcgagaaaatgacccgtgcaagagcgacgccgtttcttcttccacgtgctttggagccgatcccgagcttgacgaattcatggaagcctactgcgacatgttggtgaagtataaatccgacttggctcgcccttttgatgaagcaaccactttcctcaacaagatcgaaatgcagctcagccatctctgcactggtgcttccgtttccaacgtttctgatgatgggggtgtgtcttcggacgaagatttgagtaccggagatggtgatgctcaagatggccaattaaagggtgaagatcgtgagctcaaggataggcttttacgaaagtttgggagtcacatcggtactttgaaactcgagttttcaaagaagaaaaagaagggtaagcttccaaaggaagcaagacaagcattgcttcaatggtggaatgttcactacaaatggccttaccctacggaagctgataagattgaactggctaagtcaacagggctggaccagaagcaaattaacaattggtttattaaccaaagaaaacgtcattggaaaccatcagagaatatgcagttttctatgatggaaaattttaacggacggatccttgctgatgaatgaatgaggtgcatgtacatgatattttcaaatgtatatcccgattaattattgcttgtattttcttttttgtaaattctaaattaaaagcagattactgacagtaaaatgcttattactttcccatgaaggaaaagggaaatgatcataatagtattcttgataaataactactgacattgtgaatt

SEQ ID NO: 348 - DNA, 1334 bp, Glycine max
  CDS (144)..(1076)
gaattcccgggtcgacccacgcgtccgtacggctgcgagagacgacagaaggggagaattagatatacatattttatttatttgcttaggatattgtcctaaaacttacttgcttggaccccagtagttgagttgaggaagtgatggaagcagtttacaggttgaaacctcttttggatgtggttagagttgggaacgctaccacttctgagatgcgtcttgactcaacggctaattgttacctgcagctagaagctcctcaacctcaagagaataataatgtaaccgactcatcatcagatatgtcggatcggataatcaagatccagatcgccaatcaccctctttatccagatttactctctgcatatattgaatgccaaaaggttggagcaccgccagaactggcatgccttcttgaagaaataggccgagaaagccaccgcatgaatgctcgccgtgagataggggagggccctgaacttgaccacttcatggaaacattctgccaagttcttcatagatacaaggaggagttgtccaggcccttcaacgaagcgactttgtttttgggtgacatggaatcacaactcagcaacctttgtaatgaaacactaacaaagtcatcggataacaacaaccgctccgacgaggtagctagtggggcatcagaagaggaattaagttgtggggagatggaagcatttgaagataatgtatcttcagtaacttgtccaagtgatcaaaggcttaaagagatgctccttcgcaaatacagtggccattttagcggtttgagaaaggaatttctgaaacgaagaaaaaagggtaagctaccaaaggatgcaaggatggcactcatgggctggtggaacacccatcatagatggccttatcctacggaggaggagaaagtgaagttatcagaaattactggtctggatcaaaagcagatcaataattggttcatcaatcagagaaaacggcattggaaacctaccgaggacatgcgatttgccgtcatggacggattaagaggcggcggtggcggcggcataggagggcctatgttgttttagctctggaagtgctcctcaacgatctgaacttgtacccttcgtaattgcaggagcaatgtatgtgcattgcattcctgttacacgtgatatatatactaaattttagagactgaactgttgtttagctaatatacttgtcaaagttgtagttatagtagtgtaatgcgccattgttatgcagtattcctgaatctttgattatattataacaatgtcgtgctgaaaaaaaaaaaaaaaaaaaaaaaaagcggccgc

SEQ ID NO: 349 - DNA, 1523 bp, Glycine max
  CDS (28)..(888)
attcggctcgaggtttcttctgcagctatggcgattcaagatcaaaatggatttttcagatcacagggtggtcctccagaaggaggtggtgtatctttgagttctgggcattctgtcacacatattcaacttaatgaccagttttcttgtgggaatgactatgctctgaaggtaaggaagccgtatactatcactaaacagagagagcgatggacagatgaagaacataagaagttccttgaagctttaaagctgtatggacgggcttggcgacgtattgaagaacatgttggcacaaagactgctgttcagattcgaagtcatgctcagaagtttttttctaaggttcttcacgatcctactgggaacaatacaaacacagtggagtcaattgaaattcctcctccaagaccgaaacgaaagccgatgcatccttaccctcgtaaactagttgagaccccaaataaggaaatttcgatcccagaacaacctatgaagtctaattctctgaagtcgtcagactttgatcaagaaaaccaatctccaaaatcagtattatcaggagttggttcagacagccttggctcctctgattcagacacaccaaatggaagtttgtcgcccatgtcatccattagtggcttccatacaagcagttttacacgtgccaaacccaaaacaacaacatctgaggaagaagctgggatggacactgattcaactcatgatgagaaacctcttatgaaattcaagcttcctccaaatggatgtgtttccatcaaagaagacaacacagcagaagaatcttccggtcggactttcaaactctttggaatgactctatttgtaacagacacctgcaaaccatctccaacaatcgaggaatgctaaagatacctctaaacattcgcgcgcaacgcctttcctcctccatggaggatggcaaattggaacttgttggacactctagagcaagtgaaacatcagcaatatccaagctaaaggtgagagtggaacctgaagcatgtgggaaagggtttgtgccatataaaagatgcatatctgttgtgacagctgatgatagagaagagcaatgtatccatctttccttgtagcttataccccactggatttttccttcaaaaagtgttccctttgtcatgatgagctgtaatggttgttttggttgctgctggatgtgagttggtatgatataggaaggaaaaaggggtggctgaaaattttgatatttccgttgaattgcactgcactgcacattctccagctgttcaaatccgtaaacttgccttttctatttttttgacttccaagtttcaacacattctccgcgggtccaagccgtgtctgtgcgcggcacttaggagctgtgtccgtgcttcctagtttaactgtgaataactgtgaattatatctagtgccttttttttaaaaaaaaaaaaaactttttatgctccctaagagtatgcaaagtgtaagtcacgtactaaaaaaaaaaaaaaagg

SEQ ID NO: 350 - DNA, 2908 bp, Zea mays
  CDS (331)..(2565)
gctgcggcgtgctccttcgctggaaagtggggcagtatcttttcgcatctcctcgactccgcctctctcggatctcgccgaaggacgagcaaaggcccctgatcgcccgcttctactacaactatattctgtcgccagcgcacaagcggcgggggcacggggtagattcggagcggctcttggcttgcagtccagacgcccttcacccctgatctggaccggagggagcggctccttccgtcagttgttcttgctttgcctgggcctcttccgcctgcttcgtgttcttcacaggagccggtgacctcggacgatatcttggaggacaagatgtcgggggctgttcttgtcgccatagtcgcctccatcggcaatctattgcaggggtgggacaatgccaccatcgcagctgctgttctgtatataaagaaggaatttcaattgcaaaatgagcccactgtggagggactaattgtgtcaatgtcacttatcggcgccaccatcgttactacattctccgggccattatcagactcgattggccgacgccctatgcttattctctcttcaattctgtacttcttcagcggcctcatcatgctatggtctcctaatgtctatgtcctgctgttggcacgcttcgtagatggatttggtattggcttggctgtcacgcttgtgcctttgtacatttcagaaatagccccttcggagattagaggtttgctgaatacactaccacaattcagtggatcaggaggaatgttcttgtcatactgcatggtgtttgggatgtccctgtcgccatcacccgattggagaattatgcttggtgtgctcgcgataccttcattgttcttctttggtttgacaatattttatcttcctgaatctccaagatggctcgttagcaaaggtcggatggcagaggcaaaaaaggtgttgcaaaagttacgggggaaagacgatgtctcaggtgaattgtcccttcttctcgaagggttggaggttggaggagacacttccattgaagagtacatcattggacctgccaccgaggcagccgatgatcttgttactgacggtgataaggaacaaatcacactttatgggcctgaagaaggccagtcatggattgctcgaccttccaagggacccagcatgcttggaagtgtgctttctcttgcatctcgtcatgggagcatggtgaaccagagtgtaccccttatggatccgattgtgacactttttggtagtgtccatgagaatatgcctcaagctggaggaagtatgaggagcacattgtttccaaactttggaagtatgttcagtgtcacagatcagcatgccaaaaatgagcagtgggatgaagagaatcttcatagggatgacgaggagtacgcatctgatggtgcaggaggtgactatgaggacaatctccatagcccattgctgtccaggcaggcaacaggtgcggaagggaaggacattgtgcaccatggtcaccgtggaagtgctttgagcatgagaaggcaaagcctcttaggggagggtggagatggtgtgagcagcactgatatcggtgggggatggcagcttgcttggaaatggtcagagaaggaaggtgagaatggtagaaaggaaggtggtttcaaaagagtctacttgcaccaagagggagttcctggctcaagaaggggctcaattgtttcacttcccggtggtggcgatgttcttgagggtagtgagtttgtacatgctgctgctttagtaagtcagtcagcacttttctcaaagggtcttgctgaaccacgcatgtcagatgctgccatggttcacccatctgaggtagctgccaaaggttcacgttggaaagatttgtttgaacctggagtgaggcgtgccctgttagtcggtgttggaattcagatccttcaacagtttgctggaataaacggtgttctgtactataccccacaaattcttgagcaagctggtgtggcagttattctttccaaatttggtctcagctcggcatcagcatccatcttgatcagttctctcactaccttactaatgcttccttgcattggctttgccatgctgcttatggatctttccggaagaaggtttttgctgctaggcacaattccaatcttgatagcatctctagttatcctggttgtgtccaatctaattgatttgggtacactagcccatgctttgctctccaccgtcagtgttatcgtctacttctgctgcttcgttatgggatttggtcccatccccaacattttatgtgcagagatctttccaaccagggttcgtggcctctgtattgccatttgtgcctttacattctggatcggagatatcatcgtcacctacagccttcctgtgatgctgaatgctattggactggcgggtgttttcagcatatatgcagtcgtatgcttgatttcctttgtgttcgtcttccttaaggtccctgagacaaaggggatgccccttgaggttattaccgaattctttgcagttggtgcgaagcaagcggctgcaaaagcctaatttctttggtacctttgtgtgcaactattgcactgtaagttagaaacttgaaggggtttcaccaagaagctcggagaattactttggatttgtgtaaatgttaagggaacgaacatctgctcatgctcctcaaacggtaaaaaagagtccctcaatggcaaataggagtcgttaagttgtcaatgtcatttaccatatgttttacctatttgtactgtattataagtcaagctattcaacgctggttgttgctagaaatctttagaacaaagatgataatgatctgatctgatgttataatattcaaatctcaaataaagaaaatatcgtttctcaaaaa

SEQ ID NO: 351 - DNA, 1840 bp, Zea mays
  CDS (75)..(1643)
gcaagaagctgtccctccctccctcccctgtgcttctgctagctaggtgcctgcggaggagagatagggatacgatggccggcggtggcatcgtgaacacgggcggtggcaaggactaccccggcaagctcaccctcttcgtgttgctcacctgcatcgtcgccgccaccggcggtctcatcttcggatatgacatcggtatctcaggcggcgtgacgtccatgaacccgttcctggagaagttcttcccggaggtgtaccggaagaagcaggaggccaagacgaaccagtactgcaagtacgacaaccagctgctgcagaccttcacctcctccctctacctggccgcgctggtcgcctccttcttcgccgccaccgtcacccgcgccgtcggccgcaagtggtccatgctcgtcggcggcctcaccttcctcgtcggagccgccctcaacggcgccgcccagaacatcgccatgctcatcatcggacgcatccttctcggcgtcggcgtcggcttcgcaaatcagtccgtgcctgtgtacctgtcggagatggcgccggcgcgtctccggggcatgctcaacatcggcttccagctgatgatcaccatcggcatcctggcggcggagctcatcaactacggcaccaacaagatcaaggccgggtacgggtggcgcgtgagcctggcgctggcggcggtgccggcggccatcatcaccctgggctccctcttcctcccggacacccccaactcgctgctggagcggggccacccggaggaggcacgccgcatgctccgccgcatccgcggcacggacgacatcggcgaggagtacgcggacctggtggcggccagcgaggaggcccgccaggtgcgccacccgtggcggaacatcctgcgccgccggtaccgcgcgcagctcaccatggccgtcgcgatccccttcttccagcagctcacggggatcaacgtcatcatgttctacgcgcccgtgctgttcgacacgctgggattcaagaacgacgcctccctcatgtcctccgtcatcacgggcctcgtcaacgtcttcgccaccgtcgtgtccatcgtcaccgtcgaccgcgtcggccgccgcaagctgttcctccagggcggcgcgcagatgatcgtgtgccagctcatcgtgggcacgctcatcgccgccaagttcgggaccagcggcacgggggacatcgccaagggctacgccgcggtcgtcgtggtcttcatctgcgcctacgtcgccggcttcgcctggtcgtgggggcccctgggctggctcgtgccgtccgagatcttcccgctggagatccgcccggcggggcagagcatcaacgtctccgtcaacatgttcttcaccttctgcatcgcgcaggccttcctcaccatgctctgccacttcaagttcggcctcttctacttcttcgccggctgggtcgtcatcatgaccgtcttcatcgccttcttcctgcccgagaccaagaacgtgcccatcgaggagatggtgcttgtctggaagtcacactggttctggaaaaggttcatcgccgacgaggacgtgcacgtcggcattggcaacaaccacccggccaaaaacggcagcgacaccaagggggccgacgcgtgaacgtgatctcaacatctatattccatctacagtcacaactgaaatgtacatttaggcttccattgttccatcaactagtagctacatgtcctcctagtaaagtaccagtgtttgtttgtgtaatgtttgttacgcccattaaattcttcttggattggatgaaaaaaaaaaaaaaaaaaaaaaaaaaaaaaaaa

SEQ ID NO: 352 - DNA, 1923 bp, Glycine max
  CDS (132)..(1685)
gtttccctgtctctgttctcttcaccattctctttcttctttgtttcaagtttcaacaacccagattcactctctctctcgtaattttctctcttattgaggctagaaaaagagagcaaaaaaactaaaaaatgcctgcggtcggaggtataaacaccggagggggcaaggagtaccctggaagcctcactctatttgtgacggtaacatgtatagttgcagccatgggtggtttaatcttcggttacgatatcggaatttcaggtggagtgacgtccatggatccgtttctgctcaagttttttccgtcagtgttccggaagaaaaactccgacaaaacggtgaaccagtactgccaatacgacagccagacactgacgatgttcacgtcgtccttgtacctcgccgctttgctgtcgtcgttggttgccgccaccgtcacgcgtaaattcggccggaaactctccatgcttttcggaggcttgcttttcctcgtcggtgccctcatcaacggtttcgcccaacacgtttggatgttaatcgtgggtcggatcttgctcgggttcggtatcggcttcgccaatcagtctgtgccactctacctatctgaaatggctccatacaaatatagaggagcattgaacattggctttcagttgtccatcactgttggtatccttgtggccaatgtgttgaactatttctttgctaaaatcaaaggtggttggggatggaggttgagtttgggaggtgctatggtccctgcccttataatcacagtaggatcactagtccttccagacactcccaattccatgattgaaaggggtgatcgcgagaaggccaaggctcagcttcagagaattcgcggcatcgacaatgttgatgaagagttcaatgaccttgtggcagcaagtgaatcctctagccaagtggagcacccttggaggaacttgttgcaaagaaagtacagaccccacctcaccatggcagtgttgattccattcttccagcaactcactggaatcaatgtcatcatgttttacgcgccggtcctgttcagctccatcgggtttaaggatgatgctgctctaatgtcagctgtgatcaccggcgttgttaatgttgtcgcaacttgtgtctcaatttatggtgttgacaagtggggtaggagagcccttttccttgaaggtggagtccaaatgctcatttgccaggctgtagttgcagctgcaattggagcaaagtttggaactgatgggaacccaggtgatttgccaaagtggtatgcaattgttgtggttctcttcatttgcatttatgtatcagcatttgcctggtcatggggtcccctaggttggttggtgcctagtgagatctttcccttggagattcgttcagctgctcagagtatcaatgtgtcggtgaacatgcttttcactttcttgattgcacaagtcttcttgacaatgctttgccacatgaagttcggcttgttcctcttctttgccttcttcgtgttgatcatgacattcttcgtctacttcttcttgcccgaaacaaagggcattccaattgaagaaatggggcaggtttggcaggcacaccccttctggtccagattcgtggagcatgatgattatggcaatggtgttgagatgggaaagggagctattaaagaagtgtagttagtcctcgtcttggtttatttttctcaatgactagcgttttagcttttgttggtaaatcatactattggtttcaatgtattgaattgttcctaaaaattaaaaagggttatttttcttatgtatcccctgcttcttcatatgaagcaagtttacaggatacttttctatattaatccaattgcacaaattgttatgcctttgaaaaaaaaaaaaaaaaaaaaaaaaaaaaaaa

SEQ ID NO: 353 - DNA, 1883 bp, Zea mays
  CDS (141)..(1670)
gcgcgcgctagcctagctgctcctgcctggttcgccgtagcccgtagcccgtagcacaacaacaacaaaaaaaatctccgcggcgcggggggaggtggtctgttcaccttggggagcagcggcgggccgtcggccgagaaatgcccggtggcgccttcctcctcaacggcagcggcggcggcatggcggactacggcggcggcctcaccgtccccgtcgtcgtgacctgcctcatggcggcctccggcggcctcatcttcggctacgacattggcatctcaggaggtgtgtcggagatggaggatttcctgaacaagttcttccccgggttgctcaagaggacggcgcgcgccaacaaggacgtgtactgcatttacaacaaccaggcgctgacggccttcacgtcgtcgctgtacgcgttcggcatggtggggacgctgctggcgagccgcgtgacccggcggctggggcggcaggccgtcatgctgatcggcggcggcctgttcttggccggcgccctcgtcaacgccgccgcggccaacatcgccatgctcatcgtcgggaggatgctgctcggcctggggctcggcttctccggccaggccacgccggtgtacctcgccgaggtgtcgcccccgcgctggcgcggcggcttcatctcggccttccccctcttcatcagcgtcgggtacctggtggccaacctcatcaactacggcacctcgcggatcccgggctggggctggcgcctctcgctcggcctcgcctccgtcccggccgccgtcatggtggtcggcgccgcgttcatcccggacacccccagcagcctcgtcctgcgcgggaagcacgacgacgcccgcgccgcgctccagcgggtgcgcggcaagggcgtggacatcggccccgagttcgcggacatcctcgccgcggcggagaacgaccgccggaacgaggagggcgcgttccgccggatcctgcgccgggagtaccggccctacctggtgatggccgtggcgttcccggtgttcctcaacctcacaggggtggccgtcaccgccttcttctcgccgatactgttccggaccgtcggcttcgagagcgacgccgcgctcatgggcgccgtcatcctgggcctcatgaacatcggcggcatcctcgcgtcgggcttcgccatggaccgctacggccggaagctgctcttcatgatcggtggcgcgctcatgttcacgtgccaggtggcgatggcgagcataatcggatcacacctcggcaacgggagcaagatgcccaaggggtacgcggtgacggtgctggtggtggcgctgatcttctcggcgagcttcagctggtcgtggggcgcgctgtactggaccatccccggcgagatataccccgtggaggtgcggtcggcggggcagggcgcggccgtggcgctcaacctggggctcaacttcttgcaggcgcagttcttcctggccatgctgtgctgcttcaagtacggcaccttcctcttctacgcgtcgtggctggttgtcatgaccgccttcgccgtggcgttcgtgccggagaccaagggcgtgccgctcgagtccatggctcacgtcttcgcgcgccactggtactggggcaggttcgtcaaggaccaccagaagttgggcgaagagtccacctagctaagctaataattcggaatcagcgaacgacgtaccctactaccagtagcagattattgataagggagtcaaacacatattgcgtgtgtgtgtcttttaaagtgttcgtttagaatggcttgagaagctcatccgtgtagtaaatttggagacttcgaaatataataaatatgttcgtagttggcaagctaaaaaaaaaaaaaaaaaaaa

SEQ ID NO: 354 - DNA, 2127 bp, Glycine max
  CDS (160)..(1899)
attcggctcgagatttcaccaatttctattttcataactttctctgcagtctcttcacctttatgttaatgatattatgtgtttagagagaaagagaacaagcatagttgagcttgattgtgttcttcaacattagaacaagaaaagaaagacaacaacatggaaggaggaggagtagaagttgatgcctctgctttcagagaatgcttgtctctgtcatggaaaaatccttacgttcttcgccttgctttttctgctggaattggtggccttctctttggctatgacactggagtcatatctggggctattttatatatcagagatgatttcaaagcagtggataggaagacttggcttcaggaagccatagtgagtatggctcttgctggagcaatcgtaggagctgcagttggtgggtggattaacgatcgatttggaaggagaaaagctattcttcttgcagacacactcttctttattggctctgctgtcatggctgccgctaccaatccatctattctcattgttggtcgagttttcgttggccttggtgttggaatggcctcaatggcatctcccttatacatctctgaagcttctccaactagagttcgaggtgctttagttagtctcaatggctttctcataactggaggacaattcctctcctacctcatcaacttggccttcacaaaagcaccaggaacatggagatggatgttaggagcagcagtagtaccagccctgatacaaatcgtattaatgatgatgctgccagaatcaccgcgttggctgttccgaaagggaagagaagaagagggtaaagaaattctaaggaagatttatccaccccaggaagttgaagcagaaattaatactttgagggaatcagttgaaatagaaatcaaggaagcagaggccacagataacatcagcatagtcaaaatgctgaaaactaaaactgtgagaagaggtttgtatgcaggaatgggccttcaaattttccaacagtttgtggggatcaacactgtgatgtactacagtcctaccatagttcagttagctggttttgcatccaaccgaacagcacttcttctgtcactagtcacatctggtctcaatgcatttggttctattttgagtatatacttcatagacagaacagggaggaaaaagcttgtgttgttcagtttgtgtggtgttgtgttctcccttgttgttctaaccgttgtgttccatcagagtacaactcactccccaatggttagtgcactcgaaacctctcacttcaataacacttgcccggattaccattcagctgcgaaccctggtggatgggattgcatgaagtgcctgaaggcttctccaaattgtggcttctgtgcttctggagccaataagctcttacctggggcatgtttgatctccaatgacaccacaaaagatcagtgccatgaagaagatagactatggtacaccgtggggtgtcctagtaaatttggatggcttgcaatagtagggcttgcactctacatcatattcttctcacctgggatgggaactgtgccatgggttgtcaactctgagatttatcccctaagatatcgaggaatatgtggaggaatggcatccacatccaattgggtctcaaatcttattgttgctcagtccttcctatcattgacacaagctattgggacctcatggacatttatgatatttatattcatcaccatagctgccattatctttgttattattttcgtgcccgaaaccaaaggacttccaatggaagaagtggagaagatgttggaaggaagagatctcaacttcaagttttggcagagaagttctcactgtggagaagaagtaccaccacaaaagactcaatcaaattaagtctattgtgttgcatcatttgtaatattggagtattaactaaagaagtataggtaataaaatcgtagaatgtagctattagattctaagtatatacaataaaatcgtagaatgtagctattagattctaagtatatacaatatcttgtttgtgtgaatttttttcttatcaacaaatattattttgttaattttgttacaaattaaaaaaaaaaaaaaaaaagg

SEQ ID NO: 355 - DNA, 1931 bp, Zea mays
  CDS (74)..(1690)
cgcatttcgaaatccccaaacggaagcatcgccactcttccgaacctgaacaatcaccaccgttattaagaagatgatgcgctgcgctgcaacgggcggcgggtgcgtcgcttcgtggagcggcgatcggagattgccggcggtcaacccctgcagcgtgcggatgccgacgggcaacgatgggtggtgcgccggcctgaggtcgcgggcggcggatctcgccggcctcgagatggccaacctgcgcggcggcgtcggggggctcttccgcgcgagcccgcgctacgggcgcttgcaagccacggcggcagttgaccctgaagatattccattggagaaggttcaagttaaatcctcaggacatgttctgccatatgttggcgttgcttgtttgggggctattctgtttggttaccatcttggtgtggtcaatggcgcacttgaatatctcgcgaaggatcttgggattgctgaaaatgctgtcttgcaggggtgggtggttagcacatccttggctggtgcaacactaggttcttttactgggggttctttggcagataaatttgggcggacaagaacattcatcctggatgcagtcccacttgctctaggtgcattcttgagtgcaacagctcaagatatccgcacaatgattattggccgattgcttgctggaattggtatcggggtctcatctgctcttgtacccctttacatatctgagatctcaccaactgaaattcgtggaacacttggtaccgttaatcaactttttatttgcattggaattcttgcagctttgttagctggattgcctctggcaggaaatcctgcctggtggaggacaatgtttggaattgctgtagttccatccattctgctggctgtaggaatggccttttcgcctgaaagccctcgttggctattccagcaaggaaaggttactcaagcagaattagctgtaaaaagactgtatggaaaagaaatggttaccgaaattatgtttgatctgagagctagtggccaaagttcttcggagtccgaagccggctggtttgatcttttcagcaagcgttactggaaagttgtgagtgtgggggcagcactgtttttgttccagcagcttgctggtataaacgctgttgtatattactctacatcggtgttccgtagtgcaggcattgcatctgatgttgctgctagtgctcttgttggagcagccaatgtttttggtactatggttgcatcttctctaatggacaaacaaggaaggaaaagccttctgataacaagcttttctggaatgggtgcttcaatgctactcctagcattgtccttcacctggaaagctctggcaccttattctggtactcttgctgttgttggcactgttctgtacgtgctgtcatttgctctaggagcgggccctgttccagcgctacttcttcctgaaatatttgcctcgagaataagggccaaggctgtcgcattatctctaggcatgcactgggtatctaactttttcattggcctgtacttcctgagtgtcgtgagcaagtttgggatcagcaacgtgtatctgggatttgcatcagtatgtgcccttgcagttctgtacatagctgggaatgtggtcgagaccaaggggagatcacttgaagagattgaaagggagctaagtgtagcagaatgatgtacttttgctagtcatgctgtggcgccgttttggttatcgagaatgcaaccaagcgctcaaccgagcatccttggacctggagactctttctagtttcatgtagttttagaaataagcgaacggcaagagtaccaatcttaggtgacttggtgtgggttgtgtctgaaataagtgaattggattgtagaatttcagaaataagtgaattggattgtagaatttaaaaaaaaaaaaa

SEQ ID NO: 356 - DNA, 2051 bp, Zea mays
  CDS (146)..(1744)
catcgacatcctctcacctccctcgcactccattggatttgggggagctcggggggcgcgggccactgatgatccccggaacgagcaccgatccgtggcgaggaaactccaccgggtagccggcccgggagcgcggggcacggcgatggcgggcgccggggcagcggccaatggcggcaggaacaagtacgcggttctcgatcggagcgaggagcgacagacggacgctaggacggagcggcggaggaggccgttggcgcccgagagcgagagggggagaagggagcggttcgtgtacgcctgcgcggtcttcgcctccctcaacgccgtcctgctcggctacgatgttggcgtaatgagtggcgcgatcatctacatgcagaaagacctccacataaccgagtttcagcaagaaatcctagtaggctgtctgagcgtggtctcactcttgggaagcctatcaggggggcgaacatctgacgcaattggcagaaaatggacaatgggcctcggtgcaattgtgttccagataggcgcgaccatcatgacgtttgctccatcattcactgtgcttatgatagggaggctccttgctggggttggcattggctttggtgccatggtatctggagtgtacattgctgagatctcccccgcaggtgcccgagggacgctcacatcccttcctgagatctgcatcaattttgggatccttcttggctacgtttccaattatgccttctcaggcctttctgagcacatcaattggaggattatgcttggtgtcggtatcctcccatcagtcttcattggctttgcgcttttcgtgatcccggagtcccctaggtggttgatgatggagaagagagtttcagaagcaagggcagtgctgctgcagattagcgagtctgaagctgaagctgaagaacggctggctgagatcgaggaagccgcaggtctgatgaaatcaatgaaatctgaggacaaagaagtgtggagggaacttttgaacccgtctcccgccgtccgtcggatgctgtacgctggttgcggtattcagttgttccaacagatcacaggaattgatgctactgtctattacagcccaacaattttcaaagatgctggcatcaagtctgatcaggagcttctcgctgcaactgttgctgtgggtttcactaagacagtgttcatcttggttgcaattttcctaattgatagagttggacggaagccacttctttatgtgagcaccattggcatgaccatctgcttatttctcttgggggttgcacttacactgcaaaaccatgcggtggggcttatgtctccacgtgttggtatcgacctagcaattttcgcagtttgtggcaacgtggcattcttttcaattggcatgggaccaatatgttgggtcttgtcctcagaggtatttcctttaagattacgagctcaagggtcagcgcttggtcaagtaggtggtagagtgagcagtggtttggtttccatgtcattcctttctatggcccgtgctatatcagtggcaggaatgttcttcgtctttgctgcaatatccactatctctgtactgtttgtgtacttttgtgtgccagaaacaaaagggaaaacactggagcagatcgaaatgatgtttgaaagtggggacgaatggggaggaggtgaaattgagcttgaggatacacagcatttaataccgagtatcaagaagtctgtgcctcttggttgatatttgtagcatcaataaaattcttattagctccatgtttcaatgacgagccaaccaaaccagctggattctgaactttggtttcgagtgatctggccacactgagccacgaccgatctgataaaagataagcttgatagacataggtgcaacgtagaagattaattgtgatgttagttcaaaatgtcaatgattttactgggaggcggtctgtaatgtatgatcttacatctcttgtaccttcttacatctctcgtacctcccagcggaagaatatactcgcagaaaagttttctaaaaaaaa

SEQ ID NO: 357 - DNA, 1768 bp, Glycine max
  CDS (63)..(1505)
ttgctttctaattattcgtgttgtcagtgtctctttgaggccattttgctagctatttaataatggcaattgagaagcatgaggatgttgagagtggatatttgcacgagcccttcattcaaccagaggatgctgctgctgcttgtaaagaaaatggatcagataagagtgtgaaaaatggatccattggaatggttttgcttagcacacttgttgctgtttgtggttctttcacatttggaacttgtgtgggctattcagcacccactcaagcggctatcagggcagatcttaatctctctcttgctgagttttccatgtttggttcattagtgaccattggtgcaatgcttggagctataaccagcggcaggattacagatttcattggccgcaaaggggcaatgaggatttcaacaggattttgcattacaggatggatagctgtcttcttctctaagggttcttactcccttgacttcggaagatttttcacaggttacggcattggagttatctcatacgtggttcctgtatatatagcagaaatagcacccaaaaatcttcgaggaggactagcaacaacaaatcagcttttgattgttactggagggtcagtctcattcttattaggaagtgttataaattggagagaacttgcattagcggggctagtgccttgcatttgcttgctggttggtttgtgctttatccctgagtcccccagatggctggctaaggttggccgtgaaaaagaatttcaactagctttaagtagacttcggggtaaagatgctgatatttctgatgaagctgctgaaattctggattatattgaaactcttcaaagtcttcctaagactaagctgttggatttgttccaaagcaaatatgtgcactctgtagttattggggtcggcttaatggcatgtcaacaatctgttggaattaatggcataggattctacacagctgagatttttgtagcagctggactttcttcaggaaaagctggtaccatagcatatgcttgtatacagattccatttacattattgggagccattttgatggacaagtctggaagaagacctcttgtaatggtttccgcagctgggacattcttaggttgctttgttgctgcctttgctttctttctcaaggaccaaagcttattgcctgagtgggtacctatattagcatttgctggcgttctgatctacatagcagcattttcaattgggctcggatcagttccatgggtgataatgtctgagatatttcccatacatttgaaggggactgctggaagcttggtggttttggtggcttggctaggagcttgggtagtttcatatactttcaactttcttatgagctggagttctcctggtacattgtttttgtatgctggatgttccctcttaactattctatttgtagcaaaattagtcccagaaaccaaaggaaaaactttggaagagatccaggcttgtattagttcatagagataaaagatcaaaaacgcactgcaggacccagtcaaaccattaccaccatttttcaaattcttttacatccatttaggaccgtcaaggcataaaataacataatgttgccatatcgatccatttttgttgttgtataataataataataataataataatgtatcattagcttatttgataagaaaaaaaaaaaaaaaaaaaaaaaaaaaaaaaaaaaaaaaaaaaaaaaaaaaaaaaaaaaaaaaaaaaaaaaaaaa

SEQ ID NO: 358 - DNA, 1680 bp, Glycine max
  CDS (63)..(1595)
ttgagagcgagaaaccacgtttctctcttgaggttaattattattattattgagtattgagcatggaggcgccatctctcaccaaacccaacgacccaacaaaaccttccaacacttccagcacccttagtctggagggggggccgggcgaagcgagcccactccgaaaaatgtttgcggtggcgtccatcgccgccggcatacagttcgggtgggctctgcagctgtctctcttaaccccctacgttcagctcttaggagtcccccacgcggcggcctccttcatctggctctgtgggcccatctcggggctggtggtgcagcccattgtgggctactacagcgaccactgcacctctcgcttcggccgaaggcgccccttcatcctcggaggcgccttagccgtcgccatcgccgtgttcctcatcggctacgcggccgacataggacactccgctggcgacgacataactaaaaaaacccgaccccgtgcagttggggtcttcgtcataggattctggatcctagacgtggccaacaacatgctccagggaccctgccgcgcctttttagctgacctcgctgccggcgaccagcaaaaaacgagaatcgccaacggtttcttctcgttcttcatggccgtcggcaacgtgcttgggtatgctgcagggtcctacagcggtctccacaagatcttccccttcacggagaccaaggcctgtgacgtcttctgcgcaaacttaaaaagctgtttctttttctcgatcctactgcttctctttttagcaactgttgctctgctctacgttaaggacaagcaagttgaagcaattcctctggatgatgccactcaaccctcttgtttctttcagcttttcggtgctctgaaagagctcaagagaccgatgtggatgctgatgctggtcacagctgtgaactgggtggggtggtttccttacttccttttcgacactgactggatgggtcgtgaggtctacggtggaactgctggggaggacgcgtacgcgaagggagtgcgcgtgggatcgttagggctgatggtaaacgccgtcgtgttgggcttcatgtcgttggcggtggagccgttggggaagatggttgggggagtgaagaggctttgggcgattgtgaactttattctcgcgattgggttcggaatgacggtggtgatcaccaaggtggcggagcaccagcgccggatgaaccccgccgccgtgggccacccctccgagggggtggtggttgggtccatggttttctttggggttcttggagttccccttgcgattactttcagtgtcccttttgctctagcatcaatatactgcagcgcttcaggagcaggacaaggtttatctttgggagttctcaatcttgcaattgtggtaccacagatggtggtgtctgcattaagtggtccttgggattccttgtttggtggtggcaacttgccggctttcatggtgggtgctgcggcagccgcgttgagcgccataatggcgattgtcttgctgccaactccaaagccagctgatgaggccaaggcttcaagcatgatggcagggggctttcactagttaatggagttttgcatgtttcagttttgtcccctgctttaatagaaaaaaaaaaaaaaaaaaaaaaaaaaaaaaaaaaaaa

SEQ ID NO: 359 - DNA, 1831 bp, Zea mays
  CDS (76)..(1599)
ccacgcgtccgaaggtctcctccctcggtctccctcgggctaggctagctagctaggttaccactctggtacaacatggctggtgatggcatggaggtatctgccagcgggggtggcggcggcaacaagcagccgcagatcagccttttggggctgttcctcgcctgcatggtcgccggcggcgtgcagtacggatgggcgctgcagctctcccttctcaccccctacgtccagacactggggattcctcatgctcttacatcagtcatgtggctctgtggacctattgctggcttacttgtacaaccctgcgtcggcctctatagtgacaaatgcacttctaagcttgggagacggaggccattcatctttacaggatgcatcatcatctgtatatctgtgatagtcatcggtttctcctcagacatcggttacgctctcggtgacacgacggaagactgcaatgtttacacggggaagcggctgcacgcggccttgttcttcgtgatgggattctggctgctggacttttccaacaacacggtgcagggccccgcacgcgcgctgatggcggacctcgcaggcagccacggacccagcacggcgaacgccatcttcgtgtcgtggatggcgatcgggaacatcctgggctactcgtcggggtccaccgacaagtggcacacctggttcccgttcctgcagacgagggcatgctgcgaggcgtgcgccaacctcaaggccgccttcctggtgtcggtggtgttcctgggcctgtccacggtggtgaccatgatcttcgcccgcgaggtgccgctggacccggcggcggcggcgaagcaggacgaggccggggagtcgtcgggcccgttcgccgttttcaagggcatgaagaacatgccccccggcatgccgcaggtgctcatcgtcacgggcctcacctggctctcctggttccccttcatcctcttcgacaccgactggatgggccgcgagatgtaccacggcaggcccgacggcagccccgaggaggtggccaggttccaggagggcgtccggcagggcgccttcggcctgctcctcaactccgtcgtcctcggagccagctccttcctcatcgagcccatgtgccgcaagctcaccgccaaggtcgtgtgggtcatgagcagcttcctcgtctgcgtcgccatggccttggtcaccgtcctcagctcctggtcgctcggcgacatcgggggcaacgtgcaggacgccgccgccgtggataagggcctcaagaccaccgcgctcgccatcttcgtcttcctcggcttcccattcgcggtcctatgcagcgttccgttcgccgtgacggcacagctggcggcggccaagggcggcgggcaggggctgtgcacgggggtcctcaacatctccatcgtggtgccacagatggtcatcgccattggctctgggccgtgggacgagctgttcggcaagggcaacatcccggcgttcggccttgccgccgtcttcgccttcaccgctgccgtcgcagggatcatcatgctgccaaagcagcccaagaccagcttccggtccgtctccatgggaggaggccattgatgatcacaactctaggatgcatggtccactgtggttcacgattcttttacctttgggagttggacggccaggtgtttgttctcaaggccgcttccgaggcctaaaccggtgggtttatttctaggccggatcatgacgaacaatctgtttcgctgggttgtaaaggaaaagttttacacgaacacacaacgtgtcggctatttaacttttggaaaaaaaaaaaaaaaag

SEQ ID NO: 360 - DNA, 1996 bp, Zea mays
  CDS (201)..(1763)
ccacgcgtccgcccacgcgtccgatacgtacgtgaagaaccaacaggagggccgggctctcgctcgccgcgcgcacccccctctctctatctctcccgccgccgttgatctatcaccgggccgccggtccgtgactgtcgccagcggctgctggttgttgcttggttgcgtcgccgcgggagccgtgtgacccgggcgcaatgccgggagccgtgatcgtgcaccaccacacgaggtacaagacgtaccccggcgaggtcaccggcatcgccatcttctcgtgcttcatcgcctccgtcgccggctgcatcttcggctatgacatcggcctcacatccgggctgacgtcgacggagccgttcctggtcaagttcttcccctccatctacgaggagatgaagaggcaggtggtcgtcaaccagtactgcaagttcgacagccaggtcctgacgctgttcagctcctccctcttcctcgccgcgacggtggccaccttcttcgccggcccgatgacccgcgccttcgggcgcaagtggaccctgttcgccgccgcgtccgcgtacgtggtcggcgcgtgcatcggcggcgtgtccgtgaacttcccgatgctgctcacgggccgcgtcctcgttggctccggcgtcggcatctccatccaggcggccccgctctacatctccgaggtggcgccggcgcagcagcgcgggatgctcaacatcctgttccagctcatgatcacggtgggcatcctgacggcgaacatgaccaactacctggcgtccaaggtctcgggcggctggggctggcgcatccccgtgacgttcggcgccatcccggccgccgtcatcgcgctgggcgcgctcgccatcccggacaccccggcgtcgctcgtcgagcgcggggacacggccacggcgcgcaagacgctgtcccagatccggggcgtcggcgacgtgcgcgaggagttcgacgacctggccgccgcgagcgaggacgccaaggccgtgcagtgcccctggcgggagctcttcttcggcggcaagtacaagccccagctcacgttcgcgctgctcatccccttcttccagcagctcaccggcatcaacgtcatcatgttctacgcgccggtgctcttcaagacagtcggcttcaagcagaacgccaccctcgtgtcctccgtcatcaccggcctcgtcaacgtcttctccaccttcgtcgccatcgccaccgccgacaagatcggacgccgcgcgctcttcctgcagggcggcacgcagatgatcatctcccagatccttgtggggacgttcatcgggctgcagttcggcatgagcgggacgggcgacatctcggagcagtacgccatgtgcatcgtgctgttcgtgtgcgtgtacgtggccggcttcgcgtggtcgtgggggcccatggggtggctggtccccagcgagatctacccgctggccgtgcggtcggcggcgatgagcgtcacggtggccgtcaacatgttcttcacggccttcatcgggcagatcttcctcacgctgctctgccacctccgcttcggcctcttctacttcttcggcgcctgggtgctgctcatgacactcttcatcgccatgctgctcccggagaccaagagcgtgcccgttgaggagatggcgcacgtctggaagaagcactggttctggcgcaagttcgtcatcgacaccggcaacgacgcccgcaacgccgagatgaggaagaggatagcgctagagatgagctgatcatcgtcgtccatgcatgcagtctccatcgcccatgcatcatatatatgcagtaggcaggcaggcagatgaaggaaattacgtacacaagcgccaactaaaactaaacccaagtcaattacttcatatatcactcaatagctgctagaacatatatgaatggttgttgtagactgatcgtaatcccagatagttatgatatacatctttcattttaaaaaaaaaaaaaa

SEQ ID NO: 361 - DNA, 2211 bp, Zea mays
  CDS (93)..(1634)
ccacgcgtccgcccacgcgtccgccgttcctcgtcgtctcgtgttgtttctcgcgttgccattgccccagctgtccgcccgcgcccgcggcaatggcaggcggcgtggtggtgaacgcggccgggggcaagacgtaccccggccgcatgacgccgttcgtgttcttcacctgcctggtggcgtcatcgggcggcctcatcttcgggtacgacatcggcatctccggcggtgtcacgtccatggcgtcgttcctcaaggagttcttcccttccgtgtacgccaaggcggcggcgaacaaggacacgaaccagtactgcaagttcgacagccagctgctgacgctgttcacgtcgtcgctgtacctggcggcgctggcgacgtcgttcgtggcggcgtccgtgacgcgggtgttcgggcgcaagtggtccatgttctgcggcggggtgaccttcctggccgggtcggcgctaaacggcgccgccaccgacgtgatgatgctcatcatgggccgcatcctgctgggcgtgggcgtcggcttcgccaaccagtcggtgccgctgtacctgtcggagatggcgccggcgaagctgcgcggcatgctcaacatcgggttccagctgatgaccaccatcggcatcctggcggcgaacctgatcaacttctggacggcgggcatcgagggcgggtggggctggcgcatcgggctggggctcgcgggcgtgccggcgctcatcatcaccctgggcgcgctggtgctccccgacacgcccaactcccttatcgcccgcgggttcaacgacgacgccaaggcggtgctggtgaagatccgcggcacggacgacgtgcaggacgagtacgacgacatggtggcggcgagcgaggaggcgaacgccatcgagcacccgtggcgcaacatcctggagcgcaggtaccggccgcagctgacggtggcagcgctgatccccttcttccagcagctgacgggcatcaacgtgatcatgttctacgcgccggtgctgttcctgaccatcggcttcggcgacgacgcgtcgctgatggcggccgtcatcacggggctggtcaacatgttcgccaccgtggtgtccatcgtgtgcgtggaccgcctgggccggcgcgcgctgttcctgcagggcggcacgcagatgttcgtctcccagatcgtggtgggcacgctgatcgcgctccagttcggcaccgccggcgtgggcgagatgtcccgctccaacgcctggctgctggtgctcttcatctgcctctacgtcgccgggttcgcctggtcgtgggggccgctgggctggctcgtcccctcggaggtgttcgcgctggaggtccggtcggcggggcagagcatcgccgtgtgcgtcaacatgctgctcaccttcatcatcggccaggccttcctcagcatgctgtgctcgctcaagttcgggctcttctacttcttcgccgggtggatgttcatcatgaccaccttcatcgccctcttcctgccggagaccaagggggtgcccatcgaggagatgaacctcgtctggagccgccactggttctggggcaagtacgtcaacgtcgacacacaacacggcggcgccagcccgagatccaacggcgtctgatctgagcaagctgcagcaacacctcggcacctgacctggccatgcatgcacacgtatactataatctaacaacgtagctgacctgggcaaattgccagcctgacaggggccagggtgctcgaatgtctcactctcaccgccgactaactttccatcaaaattgattcttgttcatactccatagcatgcacagattgattgaactgctacttgagattcttgtcattgttattagagagagagacagagacagaacgattggcatagcatgcagaattgtttggaagaagctagcaaagcagttccttgtttgtatcctctgtaccagaagatgagtttgatctaggattaatccctgcaaggcaaggtaaagtaaattcatgttgtactcaaaactaacttctcccatatctgtacgtcgtataaaacaaatccctgcaatgtgcaaagattgtcccgcgtagtgattttttcgtctccagcaagatctcaaacaagccccaaatctaagtgtaacatgtttgcattcgaattaaaaaattgaatcccttattgtgaaaaaaaaaaaaaaaag

SEQ ID NO: 362 - DNA, 1522 bp, Oryza sativa
  CDS (136)..(1311)
cccacgcgtccgcgtactacggaaacttgtacactatcaagctcagcaactgcctgcccctctctttccctcgccattaagttttctcgtccggcggcgtcacccctgcgaattaactaactagctaggccggccatggagacggtggccgcggccagctacacccgcggggcggcgacgcgctcgccagcgtgctgcgccgccatgtccttctcgcagtcctacaggcccaaggccgctagaccgccgagcacgttctacggcgagtcgctgcgggttaacacggcgaggtcgctgccgtctgggaggcagtccaaggcggcgagccgggcggcgctcagcacccggtgcgagatcggggacagcctggaggagttcctgaccaaggcgacgccggataagaacctcatcaggctgctcatctgcatgggggaggcgatgaggacgatctcgttcaaggtcaggacggcgtcgtgcggcggcaccgcctgcgtcaactccttcggtgacgagcagctcgccgtcgatatgctcgccgacaagctcctcttcgaggctctggaatactctcatgtctgcaagtatgcgtgctccgaggaagtcccggagctgcaagacatgggtggaccagtcgatggtggtttcagtgtagcattcgaccctcttgatgggtccagcattgtcgacacgaacttcacagttggaaccatatttggtgtctggcctggtgacaagctgacaggcgtcaccggtggagaccaagttgctgctgccatgggcatctatggccctcgcactacttacattatcgctctcaaagattgtcctggaactcatgaattccttcttcttgatgaaggaaaatggcagcatgtcaaggacaccacaaccattggagaggggaaaatgttctctcctggtaacctgagggctacatttgataatcctgaatatgacaagctcatcaactactatgtcaaggagaagtacacattgcgttacactggaggaatggttcctgatgtcaaccagatcatagttaaggagaagggcatcttcaccaacgtgacgtctccgacagccaaggccaagctgaggctcctgttcgaggtggcgccgttgggtttcttgatagagaaagccggcgggtacagcagcgacggcaaacagtcggtgctggacaaggtgatcaacaacctcgacgagcggactcaagtggcctacggttccaagaacgagatcatccggttcgaggagactctctacggctcgtcgaggctcaccgccggcgccaccgtgggcgccgccgcctaatcttttgctgcaacgcgagcccagtgtctctgcaggcctcaaaaacgctgaaactgcagtcgttttagactcccatcctgtaatgcagattgggttgtagttgaagtgggacttgaaactgcaaagttatactcctttttgcaaggtacccgtttttttccccttttggtgtaaacagttgcatataaaggtaaattcgcattaaaaa

SEQ ID NO: 363 - DNA, 1440 bp, Oryza sativa
  CDS (171)..(1187)
gtcagttcccgcgccgtgtgaccaatactcaacacttaaaccgcgcgctttttagccgacccgagcagccggagagtgaggcgaggcgaagcgaagggaagagcgcgaggcagagtaagcagacgagaagaacagcgcgcggcgcggtagctgaggagagtggtgcggagatggatcacgaggcggacgcgtaccggacggacctgatgacgatcacgcggtacgtgctgaacgagcagagccgcaacccggaggcacgcggcgacctcaccatcctcctctcccacatcgtgcttggctgcaagttcgtcgcctccgccgtcaacaaggccgggctcgccaagctcatcgggctggccggcgagaccaacgttcagggagaggagcagaagaagctggacgtgctgtccaacgaggtgttcgtcaaggctctcgtcagcagcggccgcacctgcgttcttgtctccgaggaggacgaggaagcgacgttcgtggaccctgcgctgcgtgggaagtattgcgtgtgctttgatccactcgacggctcctccaacatcgactgtggcgtctccatcggaacgatctttgggatctacatgatcaaagataaggagaatgtgactcttgaggacgtgttacagcctggaaaaaacatggttgctgctggatactgcatgtacggcagttcctgcacgcttgttctgagtactggaaatggtgtcaatggcttcacacttgatccatctctcggggagttcatattaactcatccagacatcaagataccaaagaaagggaagatttattcagtgaatgaagggaatgcgaaaaattgggacgagcctaccgcaaagtttgtggagaagtgcaagttccctaaggatggttcatcacctaaatccttgagatacattggaagtatggttgctgatgtccaccgtacgttgctatatggaggagtatttttgtaccctgcagacaagaagagcccaaatggaaaactccgtgttctgtatgaagttttccccatgtcattcctgatggagcaggctggaggccagtctttcacaggcaaagaacgggctcttgacctcgttcctaccaagattcacgagagatccccaatatttcttggaagcttcgaagatgtggaggagatcaaagggttgtacgctgcacaggcgaagtaagctcggtttgatcgatctggcaccatcaaggcgtgcgaatggactccctggccttactgtaacatgcatgattcgtcaggcacttcttttattcgtcttactgtacgtttgtaaaattcagtgtaatagtgttgaggcctggaacagcttcatgagcaactaaggccttttctactattatttacaaaatacatacaccgtgcatctctagcagctaaagcactaatacaacaagtcactaaggcaaaaa

SEQ ID NO: 364 - DNA, 1201 bp, Triticum sp.
  CDS (14)..(1192)
ttctagagcagcaatggagaccgtcgcggctgccggctacgcccgcggggccgccacgcgctccccggcgtgctgcgccgccatgtccttctcgcagtcctacaggcccaaggctgccaggccggcgacctcgttctacggcgagtcgctgcgggcgaacacggcgaggacgtcgttcccggcggggaggcagtccaaggcggcgagccgggcggcgctcaccacccggtgcgcgatcggcgacagcctggaggagttcttgaccaaggcgacgccggacaagaacctcatcaggctgctgatctgcatgggggaggcgatgaggacgatcgccttcaaggtccggaccgcgtcctgcggcggcacggcctgcgtcaactccttcggcgacgagcagctcgccgtcgacatgctcgccgacaagctcctcttcgaggcgttggagtactcccatgtgtgcaagtacgcgtgctctgaggaagtccccgagctgcaggacatgggtggcccggtcgaaggcggattcagtgtggcgttcgacccccttgacggctccagcatcgtggacaccaacttcaccgtgggaaccatcttcggcgtctggcccggcgacaagctgaccggcgtcaccggcggtgaccaggttgctgccgccatgggcatctacggccctcgcaccaccttcgtagttgccctcaaggactgccccgggacacacgaattccttctcctcgacgaaggtaaatggcagcatgtcaaggacaccacgagcatcggagaagggaagatgttctcccttggcaatctgagggccacgttcgacaaccctgattatgacaagcttgtcaactactatgtgaaggagaagtacactctgcgttacaccggaggaatggtccctgatgtcaaccagatcatcgtgaaggagaagggcatcttcacgaacgtgacgtcgccgacggcgaaggcgaagctgcggctgctgttcgaggtggcgccgctggggttcttgatagagaaggccggcgggcacagcagcgacggcaagcagtcggtgctggacaaggtgatctccgtcctggacgagcggacccaggtggcctacggctccaagaacgagatcatccgcttcgaggagaccctctacggctcctccagactcgccgccagcgccaccgtcggcgccaccgcctaataatct

SEQ ID NO: 365 - DNA, 1501 bp, Ralstonia eutropha
  CDS (80)..(1399)
tcgataagcttgatgtaattggaggaagatcaaaattttcaatccccattcttcgattgcttcaattgaagtttctccgatggcgcaagttagcagaatctgcaatggtgtgcagaacccatctcttatctccaatctctcgaaatccagtcaacgcaaatctcccttatcggtttctctgaagacgcagcagcatccacgagcttatccgatttcgtcgtcgtggggattgaagaagagtgggatgacgttaattggctctgagcttcgtcctcttaaggtcatgtcttctgtttccacggcgtgcatgcctgaagtccaaaggatgaccctgacgcagttcctgatcgaggaacgccgccgctatccggatgccagcggcggcttcaacggcctgattctcaacgtcgccatggcctgcaaggaaatcgcgcgcgcggttgccttcggcgcgctggggggcttgcacggcaaggccagcaatcaagccggagaagcaggggccgtcaacgtgcagggcgaaatccagcagaagctggacgtgctgagcaataccaccttcctgcgcgtcaacgagtggggcgggtacctggccggcatggcgtcggaggagatggaggcgccttaccagatcccggatcactacccgcgcggcaagtacctgctggtgttcgatccgctcgacggctcatccaacatcgacgtcaatgtctcggtgggcagcatcttctcggtgctgcgcgcgcctgagggcgcaagcgccgtcaccgagcaggatttcctgcagcccggcagcgcccaggtggcggccggctacgcgctctacggtcccaccaccatgctggtgctgaccgtgggcaatggcgtcaacggcttcacgctcgatcccaacctgggcgagttcttcctcacgcaccccaacctgcaggtgccggccgatacccaggaatttgccatcaatgcgtcgaacagccgcttctgggaagcgccggtgcagcgctacatcgccgagtgcatggccggcaagagcgggccgcgcggcaaggatttcaatatgcgctggatcgcgtcgatggtggccgaggcgcaccgcatcctgatgcgtggcggcgtcttcatgtacccgcgcgactccaaggatcccgccaagccgggccgcctgcgcctgctgtacgaggccaatccgatcgccttcctgatggagcaggctggcgggcgcgccagcacgggccggcagacgctgatgtcggtggcgccgggtgcgctgcaccagcgcattggcgtgatcttcggctcgcgcaatgaagtggaacggatcgagggctaccacaccgaccagaccgatcccgaccttccgagtcccctgttcaacgagcgcagcctgttccgcgcgtctgcctgaggtgcctggcaagggcgaattccagcacactggcggccgttactagtggatccaattcccgatcgttcaaacatttggcaataaagtttcttaagattg

SEQ ID NO: 366 - DNA, 1301 bp, Chlorella sorokiniana
  CDS (90)..(1238)
gtgacgaccacaaaagaattccctctatataagaaggcattcattcccatttgaaggatcatcagatactgaaccaatccttctagacgatgcaggccaccgctgtcgccaccgccgcccctgcggcccgcgtcgccaccactggcaaggccgccaccggcgtcaaggccgccccccgcgtggccgtgcgcgccgccggcgccagcgccagcagcagctttgccaccggcgcccgcctgagcgccaaggccagccgcaccgccgcccgccgcgccgccgtggccgcccaggccaagatcggcgacacgctggaggagttcctgctggaggccacccccgaccccaagctgcgccagctcatgatgtccatgtccgaggccatccgcaccatcgcctacaaggtgcgcaccgcctcgtccggcggcaccgcctccgtcaactcgttcggcgatgagcagctggccgtcgacctgctggccgacaagctgctgttcgaggccctcaagtactctggctgctgcaagctggcgtgctctgaggaggtgcctgagcccctggacctgggcggcgagggcttctccgtggcatttgaccccctggacggctcctccatcgtggacaccaacttctctgtgggcaccatctttggcgtgtggcccggcgacaagctgaccggcatcacgggccgccagcaggccgccgccggcatgggcatctacggcccccgcaccgtcttctgcatcgccctcaaggacgcccccggctgccacgagttcctgctgcaggacgatggcaagtggctgcacgtgaaggagaccgagaccatcggcgagggcaagatgttctcccccggcaacctgcgcgccacctttgacaaccccgcgtacgagaagctgatcgcctactacatcggcgagaagtacacgctgcgctacaccggcggcatggtgcccgacgtgttccagatcatcgtgaaggagaagggcgtgttcaccaacgtcatctccccctccaccaaggccaagctgcgcctgctgttcgaggtggcgcccctggccctgctggttgagaaggcaggcggcgcctcctcctgcgacggcctgtgcgtgagcggcctggacgtggaggtcaagcagcacgaccagcgcacccagatctgctatggctccaagggcgaggtgcggcggtttgaggagtacatgtacggcaactccccccgcttctccgaggtcaccgcctaagcggctggtcatcgcctgagcggctcagtgctgctgactatgcagccggcggctgactat

SEQ ID NO: 367 - DNA, 1709 bp, Glycine max
  CDS (45)..(1607)
gcctcacaaaagcaaagatcaaacaaaccaaggacgagaacacgatgttgcttgaacttgcacttggtttattggttttggctctgtttctgcacttgcgtcccacacccactgcaaaatcaaaagcacttcgccatctcccaaacccaccaagcccaaagcctcgtcttcccttcataggacaccttcatctcttaaaagacaaacttctccactacgcactcatcgacctctccaaaaaacatggtcccttattctctctctactttggctccatgccaaccgttgttgcctccacaccagaattgttcaagctcttcctccaaacgcacgaggcaacttccttcaacacaaggttccaaacctcagccataagacgcctcacctatgatagctcagtggccatggttcccttcggaccttactggaagttcgtgaggaagctcatcatgaacgaccttctcaacgccaccactgtaaacaagttgaggcctttgaggacccaacagatccgcaagttccttagggttatggcccaaggcgcagaggcacagaagccccttgacttgaccgaggagcttctgaaatggaccaacagcaccatctccatgatgatgctcggcgaggctgaggagatcagagacatcgctcgcgaggttcttaagatctttggcgaatacagcctcactgacttcatctggccattgaagcatctcaaggttggaaagtatgagaagaggatcgacgacatcttgaacaagttcgaccctgtcgttgaaagggtcatcaagaagcgccgtgagatcgtgaggaggagaaagaacggagaggttgttgagggtgaggtcagcggggttttccttgacactttgcttgaattcgctgaggatgagaccatggagatcaaaatcaccaaggaccacatcaagggtcttgttgtcgactttttctcggcaggaacagactccacagcggtggcaacagagtgggcattggcagaactcatcaacaatcctaaggtgttggaaaaggctcgtgaggaggtctacagtgttgtgggaaaggacagacttgtggacgaagttgacactcaaaaccttccttacattagagcaatcgtgaaggagacattccgcatgcacccgccactcccagtggtcaaaagaaagtgcacagaagagtgtgagattaatggatatgtgatcccagagggagcattgattctcttcaatgtatggcaagtaggaagagaccccaaatactgggacagaccatcggagttccgtcctgagaggttcctagagacaggggctgaaggggaagcagggcctcttgatcttaggggacaacattttcaacttctcccatttgggtctgggaggagaatgtgccctggagtcaatctggctacttcgggaatggcaacacttcttgcatctcttattcagtgcttcgacttgcaagtgctgggtccacaaggacagatattgaagggtggtgacgccaaagttagcatggaagagagagccggcctcactgttccaagggcacatagtcttgtctgtgttccacttgcaaggatcggcgttgcatctaaactcctttcttaattaagatcatcgtcatcatcatcatatgtaatatttactttttgtgtgttgataatcatcatttcaataaggtctcattcatctaaaaaaaaataaaaa

SEQ ID NO: 368 - DNA, 1485 bp, Glycine max
  CDS (52)..(1059)
attcggctcgagaacatttttgatcttccttcctctgaaacaagaaccaaaatggagaattcgaccgaagaatcccatctccgatcggaaaactccgtcacttacgagtccccttaccctatctacggcatgtcattctccccctcccacccccaccgcctcgccctcggcagcttcatcgaagaatacaacaaccgcgtcgacatcctctctttccaccctgacaccctttcggtaactccccacccttctctctccttcgaccacccttaccctcccaccaaactcatgttccacccccgcaaaccctccccttcctcttcctccgacctcctcgccacctccggcgactacctccgcctctgggagatccgtgataactccgtggatgccgtctccctcttcaacaacagcaagaccagcgagttctgcgcccccttaacctctttcgactggaacgacatcgaccccaaccgcatcgccacctccagcatcgacaccacctgcaccatctgggacatcgaacgcaccctcgtcgaaacccaactcatcgctcacgacaaggaggtttacgacatcgcctggggagaggccagagtcttcgcctccgtctccgccgacggctccgttagaatcttcgaccttcgcgacaaggagcactccaccatcatctacgagagcccccaccctgacacccctttgctccgcttggcttggaacaaacaggacctgaggtacatggccaccattttaatggacagtaataaagttgtgattttggatattaggtctcccactacccctgttgcggagttagagaggcaccgtgggagtgtgaacgccattgcttgggctcctcatagctccacgcatatttgttctgctggtgatgatactcaggctcttatttgggaattgcccacgcttgcttctcccactgggattgatcccgtctgcatgtactctgctggctgtgaaattaaccagctgcagtggtccgccgcccagcccgattggattgccattgcttttgccaacaagatgcagcttttgaaggtttgaggtcagaacaaacaattacacattctagccacttcattgtggcatagacatagcaacttctgatcacttgagtgactgagttatatatattattgtagttgtgcaaactagtttgccctcctcatgttttacttgtggcgaaattaacgatgttcaatttgtctgttaaagatggatttttaacctgttgtgaagtaagatttcttgtctgtgatgtggaagccatagctattagtttcttagttaacatgagaaatcacatgtagtatgtggaatcaattaccacacatccagattataggtcgtaaaatcttcagtgtttgtattcccatttgattttaaacaccctacctctgatatgtatggactatggatctgtattcttgagcttttgccataaaaaaaaaaaaaaaaaaaaaaagg

SEQ ID NO: 369 - protein, 484 aa, Zea mays
MDKSGGEAAAAAAAADDVERRGGDYEQDEHERRGTVWTATAHIVTAVIGSGVLALAWSVAQLGWVAGPLALAGFACVTYYTSTLLAGAYRAPHPVTGHRNRTYMDAVRSYLSPREVFMCGVAQYVNLWGTMVGYTITATISMAAIRQADCLRRDGAGAGARCDAPGTVLMLAFSVVQVVLSQFPGLEHITWLSVVAAAMSFAYSFAGLGLSVGHWVSRGGGGLGGRVAGAAAASSTRKLWNVLLALGNIAFAYTFAEVLIEIQDTLKSPPPENRTMKKAAMYGIGATTIFYISVGCAGYAAFGSNAPGNILAAGGLGPLWLVDIANMCLILHLIGAYQVYAQPVFASVERWAASRWPEAKFMSSAYTVSVSIPLLQRGSVTVAPHKLVLRTAIVGATTAVALAIPFFNAVLGLLGAFSFWPLTVYFPISMHIAQGKIARGTKWWCLLQALSMVCLVISVAVGVGSVTDIVDSLKASSSPFKIVG

SEQ ID NO: 370 - protein, 473 aa, Oryza sativa
MDQHQLDEENQRAALFHSSAPSSSLGADGEEERETVPLLSCKMADDKSDTVQVSEDTAHQISIDPWYQVGFILTTGVNSAYVLGYSASIMVPLGWIGGTCGLILAAAISMYANALLAHLHEVGGKRHIRYRDLAGHIYGRKMYSLTWALQYVNLFMINTGLIILAGQALKAIYVLFRDDGVLKLPYCIALSGFVCALFAFGIPYLSALRIWLGLSTVFSLIYIMIAFVMSLRDGITTPAKDYTIPGSHSDRIFTTIGAVANLVFAYNTGMLPEIQATIRPPVVKNMEKALWFQFTVGSLPLYAVTFMGYWAYGSSTSSYLLNSVKGPIWIKTVANLSAFLQTVIALHIFASPMYEFLDTRFGSGHGGPFAIHNIMFRVGVRGGYLTVNTLVAAMLPFLGDFMSLTGALSTFPLTFVLANHMYLTVKQNKMSIFRKCWHWLNVVGFSCLSVAAAVAAVRLITVDYSTYHLFADM

SEQ ID NO: 371 - protein, 442 aa, Sorghum bicolor
MAGSSSMDTEAAGQQLKHGSGYSIPATAHAVDTDSWQQVSLLMVIGFNCAYVLSFSNLMMVPLGWAWGVACLLLVGAAAWYANWLLAGLHFVDGQRFIRYRDLMGFVFGRNMYYITWFLQFTTLLLCNMGFILLGARALKAINSEFTHTPARLQWFVTATGFIYFAFAYFVPTISAMRNWLATSAALTLAYDVALLAILIRDGKSNKQKDYNVHGTQAEKVFNALGAVAAILVCNTSGLLPEIQSTVREPAVRGMRRALLLQYTAGAAGYYGISVAGYWAYGSAVSEYLPNELGGPRWAAVLINATAFLQSIVSQHLFTVPIHEAMDTRLQRLDEGMFSRYNLTRRLCARGLVFGFNVFVTALFPFMGDFVNLVGSFALVPLTFTFPSMAILKIKGKSGGRCNRLWHWGIIVFSSVLCVATTAAAVRLIFNNARIYHFFADM

SEQ ID NO: 372 - protein, 475 aa, Oryza sativa
MASGQKVVKPMEVSVEAGNAGEAAWLDDDGRARRTGTFWTASAHIITAVIGSGVLSLAWAIAQLGWVAGPAVMLLFAFVIYYTSTLLAECYRTGDPATGKRNYTYMDAVRANLGGAKVTFCGVIQYANLVGVAIGYTIASSISMRAIRRAGCFHHNGHGDPCRSSSNPYMILFGAVQIVFSQIPDFDQIWWLSIVAAVMSFTYSGIGLSLGIVQTISNGGIQGSLTGISIGVGVSSTQKVWRSLQAFGDIAFAYSFSNILIEIQDTIKAPPPSEAKVMKSATRLSVATTTVFYMLCGCMGYAAFGDAAPDNLLTGFGFYEPFWLLDVANVAIVVHLVGAYQVFVQPIFAFVERWASRRWPDSAFIAKELRVGPFALSLFRLTWRSAFVCLTTVVAMLLPFFGNVVGLLGAVSFWPLTVYFPVEMYIAQRGVPRGSARWVSLKTLSACCLVVSIAAAAGSIADVIDALKVYRPFSG

SEQ ID NO: 373 - protein, 455 aa, Zea mays
MGTQAPEKENYPPEKDARSAREKAIDEWLPITSSRNAKWWYSAFHNVTAMVGAGVLSLPYALSELGWGPGIAVLVVSWVITLYTLWQMVEMHEMVPGKRFDRYHELGQHAFGEKLGLWIVVPQQLVVEVGVNIVYMVTGGRSLKKFHDVLVCGDGGASCQGKDNIKTTYFIMIFASVHFVLSQLPNFNSISGVSLAAAVMSLSYSTIAWGASVDKGRMAGVDYHLRATTTPGKVFGFFGALGDVAFAYAGHNVVLEIQATIPSTPEKPSKKPMWKGVVVAYVVVALCYFPVALIGYWAFGNSVQDNILITLSRPRWLIALANMMVVIHVIGSYQIYAMPVFDMIETVLVKKLRFPPGLTLRLISRTAYVAFTMFIAITFPFFGGLLGFFGGFAFAPTTYFLPCVMWLAIYKPKRFSLSWFTNWICIILGVILMILSPIGGLRQIIMDAKTYQFYS

SEQ ID NO: 374 - protein, 446 aa, Oryza sativa
MAPPSAMNTSRAEEKAIDDWLPITSSRNAKWWYSAFHNVTAMVGAGVLSLPFAMSELGWGPGVAAMIMSWVITLYTLWQMVEMHECVPGRRFDRYHELGQHAFGDKLGLWIVVPQQLIVEVGVCIVYMVTGGKSLKKFHDLVAPPSAPPIRTSYFIVIFGCLHLVLSQLPNFNSITGVSLAAAVMSLSYSTIAWAASLHHHNHNNGAAAGGVDYSLTAATPAGRTFNFLSALGDVAFAYAGHNVVLEIQATIPSTPERPSKGPMWRGVVLAYGVVAVCYLPVAFAGYYVFGNAVDDNVLITLERPAWLIAAANIFVVVHVVGSYQIYAMPVFDMLETFLVKKLRFKPGMPLRLIARSLYVLFTMFVAIAVPFFGGLLGFFGGFAFAPTTYFLPCIMWLSIMKPKRFGLSWCINWFCIIIGVLLSVFAPIGGLRSIIVNAQSYKFFS

SEQ ID NO: 375 - protein, 446 aa, Zea mays
MQEQDVDDGGGRTTQQQEKSIDDWLPINSSRKAKWWYSAFHNVTAMVGAGVLGLPYAMSELGWGPGIAVMILSWIITLYTLWQMVEMHEMVPGKRFDRYHELGQHVFGDRLGLWIVVPQQLAVEVSLNIIYMVTGGQSLKKFHDVICDGGRCGGDLKLSYFIMIFASVHLVLSQLPNFNSISAVSLAAAVMSLSYSTIAWGASLHRGRREDVDYHLRATTTPGKVFGFLGGLGDVAFAYSGHNVVLEIQATIPSTPDKPSKKAMWKGAFVAYVVVAICYFPVTFVGYWAFGSGVDENILITLSKPKWLIALANMMVVVHVIGSYQVYAMPVFDMIETVLVKKMRFAPSLTLRLIARSVYVAFTMFLGITFPFFGGLLSFFGGLAFAPTTYFLPCIMWLKVYKPKRFGLSWFINWICIVIGVLLLILGPIGGLRQIILSATTYKFYQ

SEQ ID NO: 376 - protein, 473 aa, Oryza sativa; identical to SEQ ID NO: 370

SEQ ID NO: 377 - protein, 447 aa, Oryza sativa
MGTQVADNYPPAKDGRSAQEKAIDDWLPITSSRNAKWWYSAFHNVTAMVGAGVLSLPYAMSELGWGPGIAVLILSWIITLYTLWQMVEMHEMVPGKRFDRYHELGQHAFGEKLGLWIVVPQQLVVEVGVNIVYMVTGGKSLKKFHDVLCEGHGCKNIKLTYFIMIFASVHFVLSQLPNFNSISGVSLAAAVMSLSYSTIAWGASVDKGKVADVDYHLRATTSTGKVFGFFSALGDVAFAYAGHNVVLEIQATIPSTPEKPSKKPMWKGVVVAYIIVALCYFPVALVGYWAFGNHVDDNILITLSRPKWLIALANMMVVIHVIGSYQIYAMPVFDMIETVLVKKLRFPPGLTLRLIARTLYVAFTMFIAITFPFFGGLLGFFGGFAFAPTTYFLPCIMWLAIYKPRRFSLSWFTNWICIILGVMLMILSPIGGLRQIIIDAKTYKFYS

SEQ ID NO: 378 - protein, 247 aa, Arabidopsis thaliana
MNIAHTIFGVFGNATALFLFLAPSITFKRIIKNKSTEQFSGIPYPMTLLNCLLSAWYGLPFVSKDNTLVSTINGTGAVIETVYVLIFLFYAPKKEKIKIFGIFSCVLAVFATVALVSLFALQGNGRKLFCGLAATVFSIIMYASPLSIMRLVVKTKSVEFMPFFLSLFVFLCGTSWFVYGLIGRDPFVAIPNGFGCALGTLQLILYFIYCGNKGEKSADAQKDEKSVEMKDDEKKQNVVNGKQDLQV

SEQ ID NO: 379 - protein, 291 aa, Oryza sativa
MEHIARFFFGVSGNVIALFLFLSPVVTFWRIIKKRSTEDFSGVPYNMTLLNCLLSAWYGLPFVSPNNILVTTINGTGSVIEAIYVVIFLIFAERKARLKMMGLLGLVTSIFTMVVLVSLLALHGQGRKLFCGLAATIFSICMYASPLSIMRLVIKTKSVEFMPFLLSLSVFLCGTSWFIYGLLGRDPFIAIPNGCGSFLGLMQLILYAIYRNHKGATPAAAAGKGDAADDVEMAEGRNNKVADGGAADDDSYGRRQGGHRSVALACVSNRLRFPACVLLLQVVILARPLLL

SEQ ID NO: 380 - protein, 244 aa, Oryza sativa
MVSNTIRVAVGILGNAASMLLYAAPILTFRRVIKKGSVEEFSCVPYILALFNCLLYTWYGLPVCLPSMGLAYCLRSHSSAYTHGLHPEKERQKFVLRMVLPVLAFFALTAIFSSFLFHTHGLRKVFVGSIGLVASISMYSSPMVAAKQVITTKSVEFMPFYLSLFSFLSSALWMIYGLLGKDLFIASPNFIGCPMGILQLVLYCIYRKSHKEAEKLHDIDQENGLKVVTTHEKITGREPEAQRD

SEQ ID NO: 381 - protein, 489 aa, Zea mays
MDYLAAAVPVTLALGVGAILLVLRWTYCRRRTSAEEARLPPGSRGLLFLGETLHYLAASSTPGVLPPFFQRRLERYGPIFRTNLVGEDLVVSLDAELNAHVLKQEERGFQIWYPPSFMRVFGADNITAKLGVLHRHMRTLVLRLFGHQTVRSVLLHDVQRSARDELRSWLGRPDVEVRTATSRMIFGVTANKLISHDDAASGGTLWRCFHDWTSGLLSFPVSIPGTTFYRCMQGRKKVMTMLKQQLVERRRNAAERETTEDFFDLVIDELNKPDPMMDESTALDLLFTMLFASHETTSMVLTVILKYLTDNPKALQELTEEHERILESRADPGSDLTWEEYRSMKFTSHVIHESLRLANIALAMFRKANQDVHINGYTIPKGSKIMMCALASHLNTEVYEDPSVFNPWRWKDIPEPVGTSKDFMAFGGGLRLCAGAEFSKMQMAMFLHYLVTNYSWKPVSGGTMLFYPGLQFPEGFHIQLLPKIPNVVP

SEQ ID NO: 382 - protein, 499 aa, Zea mays
MAFFLALVCILILLAIASYVQYTRWQKGKGRFGGHGRSAPLKLPPGSMGWPYLGETLQLYSQDPSFFFASKQKRYGEIFKTHLLGCPCVMLASPEAARFVLVTQAHLFKPTYPRSKERMIGPSALFFHQGDYHLRLRKLVQGALGPDALRALVPEVEAAVRSTLASWDAGHVRSTFHAMKTLSFDVGIVTIFGGRLDERRKAELRKNYSVVEKGYNSFPNSLPGTLHYKAMQARRRLHGVLCDIMRERRGQAQAAGTGLLGCLMRSRGDDGAPLLSDEQIADNVIGVLFAAQDTTASALTWIVKYLHDHPKLLEAVRAEQAAVREATGGGRQPLAWAHTKSMALTHRVILESLRMASIISFTFREAVADVEYKGFLIPKGWKVMPLFRNIHHSPDYFQDPHKFDPSRFQVAPRPSTFLPFGHGVHACPGNELAKLEMLVLIHHLVTGYRWQIVGSSDEVEYSPFPVPKHGLPVRLWRQNNPVDRKGRETDDDHVERIFI

SEQ ID NO: 383 - protein, 518 aa, Zea mays
MCPVRGGGCSWPASVVGSVTAALLLAAVIVRLFVPRACSSGIIKGRRQVGAGAAGGARLPAGSLGWPLLGETLAFIRAAYSPRPESFVEKRRVLYGKVFKSHLWGSPAVVSSDPEVSRAVLQADASAFVPWYPRSLMELMGQSSILVLGGGLQRRVHGLAGAFFKSPQLKAQVTLDMQRRVGRAMDMWGRRHRSMGDDDSGGMPVRVQNEAKSIVFEILVRALIGLEEGDKMQYLRQQFQEFIAGLISLPVKLPGTQLYRSLKAKKRMTKLIKTIIQEKRKKMMSEGDEDLRGGTHPRDMIDVLLGNGNDELSDELISDNMIDFMIPAEDSVPVLITLAVKYLSECPLALQQLEEENMELKRQKSGAGETLEWTDYMSLAFTQHVITETLRMGNIINGIMRKAVRDVEVRGHLVPKGWRVLVYFRAVHLDAAVHDDPHAFNPWRWKERPDVVAMSGFTPFGGGQRLCPGLDLARLEASIFLHHLVTNFRWVAEEDTVVNFPTVRLKRGMPIAVTPRTC

SEQ ID NO: 384 - protein, 503 aa, Zea mays
MDAGGPPPLFLLGAVLAAALGWLLVVWRAAAGRRRSASARLPPGSTGLPLIGETLRLIAAYKSPNPEPFIDERVARHGSGVFTTHVFGERTVFSADPAFNRLLLAAEGRAVSCSYPSSIATLLGPRSLLLTSGPAHKRLHSLTLTRLGRPASPPLLAHIDRLVLATMRGWDRPGAGAMRLLDEAKKITFNLTVWQLVSIEPGPWTESVRREYVKLVDGFFSIPFPFASLLPFTVYGQALKARKKVAGALREVVRKRMDDKAEDDCGASKKNGEKKDMVEELLEAEGGSFSVEEMVDFCLSLLVAGYETTSVLMTLAVKFLTETPTALAQLKEEHDSIRGVKGKGQALEWSDYKSMPFTQCVISETLRVANLISGVFRRANTDIHFKGHVIPKGCKIFASFRAVHLSLDHYENARTFDPWRWQQGKSKLQSAEGASLFTPFGGGPRLCPGYELARVVVSVFLHHLVTRFSWEEAEEDRIVFFPTTRTLKGYPIILRRRPDCDDL

SEQ ID NO: 385 - protein, 519 aa, Zea mays
MLGVGMAAAVLLGAVALVLADAAARRAHWWYREAAEAVLVGAVALVVVDAAARRAHGWYREAALGSARRARLPPGEMGWPLVGGMWAFLRAFKSGKPDAFIASFVRRFGRTGVYRSFMFSSPTVLVTTAEGCKQVLMDDDAFVTGWPKATVALVGPRSFVAMPYDEHRRIRKLTAAPINGFDALTGYLPFIDRTVTSSLRAWADHGGSVEFLTELRRMTFKIIVQIFLGGADQATTRALERSYTELNYGMRAMAINLPGFAYRGALRARRRLVAVLQGVLDERRAARAKGVSGGGVDMMDRLIEAQDERGRRLDDDEIIDVLVMYLNAGHESSGHITMWATVFLQENPDMFARAKAEQEAIMRSIPSSQQGLTLRDFRKMEYLSQVIDETLRLVNISFVSFRQATRDVFVNGYLIPKGWKVQLWYRSVHMDPQVYPDPTKFDPSRWEGHSPRAGTFLAFGLGARLCPGNDLAKLEISVFLHHFLLGYKLARTNPRCRVRYLPHPRPVDNCLAKITRVGS

SEQ ID NO: 386 - protein, 470 aa, Zea mays
MGAFLLFVCLLAPVVVLACAVRGRKRRASSAAAGGKALPLPPGSMGWPYVGETFQLYSSKNPNVFFARKQNRYGPIFKTHILGCPCVMVSSPEAARFVLVTQAHLFKPTFPASKERMLGPQAIFFQQGDYHAHLRRLVSRAFSPEAIRGSVPAIEAIALRSLESWDGRLVNTFQEMKLYALNVALLSIFGEEEMRYIEELKQCYLTLEKGYNSMPVNLPGTLFHKAMKARKRLGAVVAHIIEARREGERQRGSDLLASFLDDREALTDAQIADNVIGVIFAARDTTASVLTWMVKFLGDHPAVLKAVIEEQQEIARSKGSSGEPLTWADTRRMRTTSRVIQETMRVASILSFTFREAVEDVEYQGYLIPKGWKVMPLFRNIHHSPDHFPCPEKFDPSRFEVAPKPNTFLPFGNGTHSCPGNELAKLEMLVLFHHLATKYRWSTSKSESGVQFGPFALPLNGLPMTFVRKD

SEQ ID NO: 387 - protein, 1420 aa, Oryza sativa
MLSIASRSPSPALIAPHASARATGLRAPFAGNRIVGWGWGDQTKSGTDRNRASICVVLFLRVRSGEPTQAPRDPPAAVGGGGCYVRLPAPPRDRDAVLSFLVPVSKPAYHVCLFTLLLCFIPITALAESDIKNLFALRKAIAVGKGFLHNWFELETPPCNWSGISCVGLTVVAIDLSSTPLYVDFPSQIIAFQSLVRLNVSGCGFSGELPEAMVNLQHLQHLDLSDNQLGGPLPASLFDLKMLKVMVLDNNMFSGQLSPAIAHLQQLTVLSISTNSFSGGLPPELGSLKNLEYLDIHTNAFSGSIPASFSNLSRLLYLDANNNNLTGSIFPGIRALVNLVKLDLSSNGLVGAIPKELCQLKNLQSLILSDNELTGSIPEEIGNLKQLEVLNLLKCNLMDTVPLSIGNLEILEGLYISFNSFSGELPASVGELRNLRQLMAKSAGFTGSIPKELGNCKKLTTLVLSGNNFTGTIPEELADLVAVVLFDVEGNRLSGHIPDWIQNWSNVSSISLAQNMFDGPLPGLPLHLVSFSAESNRLSGSIPAKICQGTFLQILRLNDNNLTGSIDETFKGCKNLTELSLLDNHLHGEIPEYLALLPLVSLDLSHNNFTGMIPDRLWESSTILDISLSDNQLTGMITESIGKLLSLQSLSIDRNYLQGPLPRSIGALRNLTALSLSGNMLSEDIPIQLFNCRNLVTLDLSCNNLTGHIPKAISHLTKLNTLVLSRNRLSGAIPSELCVAFSRESHSELEYVQHIGLIDLSRNRLTGHIPRAINNCSILVELHLQDNLLSGTIPVELAELRNITTIDLSSNALVGPVLPWPVPLASLQGLLLSNNRLSGSIPSGIGNILPQITMLDLSGNALTGTLPLDLLCKESLNHLDVSDNNISGQIPFSCHEDKESPIPLIFFNASSNHFSGSLDESISNFTKLTYLDLHNNSLTGRLPSAIARVTSLYYLDLSSNDFSGTIPCGICGMFGLTFANFSGNRDGGTFTLADCAAEEGGVCAANRVDRKMPDHPFHVLEATICCIATAIVIVLVVILVVYLRRRRKMLRRRQFVLVPAGDNAMADHETTLSNNLLGRRRMKKREPPSINLATFEHAPVRVTVDEIMRATGNFDGMHVVGDGGFGTVYRAELPGGRRVAVKRLHGVGRRFQGGEREFRAEMETVGKVRHPNLVPLLGYCAAGDERFLVYEYMEHGSLEDRLRGGGGAALGWPERLTICGGAARGLAFLHHGFVPHVIHRDVKSSNVLLGEGLQPRVSDFGLARIISACETHVSTVLAGTLGYIPPEYALAMRCTAKGDVYSFGVVMLELLTGRPPTWSSAEVTAEGDDERGGGGSLVGWVRWMAARGRGGEVFDACLPVSGAEREQMARVLDVARDCTADEPWRRPTMAEVARRVGAIEAMEYGPLVVAVSSGEPPAMP

SEQ ID NO: 388 - protein, 330 aa, Oryza sativa
MADFRTSTHRERWIFQTNDLMDRWGAANQRATETLVQYGTTRLKVDPVDGSLSYPEPAPDHVVGSSGVKPLSCEEERLMRVFYEQKIQEVCSAFKFPHKIQATAIIYFKRFYLQWSVMEHHPKHIMLTCIYSSCKVEENHVSAEELGKGIQQDHQIILNNEMIVLKSLDFDLIVYAPYRSIEGFVDDMEDFCRAGNGEHQRLQDLRQTAISQVDKMMLTDAPLLYTPGQLALAALHKSNDMHKILNFERYLESVFSRQHSDCPIEQFVGSINMINYLVEQLKIPTPKDMRHIDRKLKHCLDPSSQDEHKKKEKKSKHKSKRAANEAQLDS

SEQ ID NO: 389 - protein, 424 aa, Oryza sativa
MASGDGGDDAGVKRVADRYLKREVLGEGTYGVVFKAVDTKTGNTVAIKKIRLGKYKEGVNFTALREIKLLKELKDSNIIELIDAFPYKGNLHLVFEFMETDLEAVIRDRNIVLSPADTKSYIQMMLKGLAFCHKKWVLHRDMKPNNLLIGADGQLKLADFGLARIFGSPERNFTHQVFARWYRAPELLFGTKQYGSAVDIWAAGCIFAELLLRRPFLQGSSDIDQLGKIFAAFGTPKSSQWPDMVYLPDYVEYQFVSAPPLRSLFPMASDDALDLLSRMFTYDPKARITAQQALEHRYFLSVPAPTKPSQLPRPPPKGDSGNNKIPDLNLQDGPVVLSPPRKLRRVTAHEGMEVHMHRADRTEEHPSGARHMDDMSSQSSRIPMSVDVGAIFGTRPAPRPTLNSADKSRLKRKLDMDPEFGYTE

SEQ ID NO: 390 - protein, 409 aa, Glycine max
MDPPPKSWSIHTRSEIIAKYEVMERVGSGAYADVYRGRRLSDGLTVALKEIHDYQSAFREIDALQLLEGSPNVVVLHEYFWREDEDAVLVLEFLRTDLATVIADTAKANQPLPAGELKCWMIQILSGLDACHRHMVLHRDLKPSNLLISEHGLLKIADFGQARILMEPGIDASNNHEEYSRVLDDIDNKDTITSTHDGNATCNTSDVDREEEELGCFTSCVGTRWFRAPELLYGSRNYGLEVDLWSLGCIFAELLTLQPLFPGTADIDQLSRIIGVLGNLDENAWAACSKLPDYGIISFSKVENPAGLEACLPNRSPDEVALVKKLVCYDPAKRATAMELLHDKYFSDEPLPVLVSELRVPLTRKEQDGDSPGGWGDINDMDSDSDSQFDEFGPLNITRTGTGFSIQFP

SEQ ID NO: 391 - protein, 194 aa, Zea mays
MVMVSGGGGNAWAKEMTLRRRIASIFNKTQEHFPTLKDYNDYLEEVEDMTFNLIEGIDVEEIEAKIARYQQENAEQIYLSRAKRAEDLAAALKASRMNPVKAEANDTAAGSSQGISGGAGVQGQYAPAAVLGGVAQPRPTGMAPQLIGSGSDPLQGDDEETRRLRAERAARAGGWTAELSKRRALEEAFSAIFI

SEQ ID NO: 392 - protein, 429 aa, Zea mays
MASAGISGSGDDDAGGKLLADRYQKGEVLGEGTYGVVFKAFDTKTGNTVAVKRIWVGKDKKEGVNFTTLREIRLLKELKGPNIIELIDCFPYKENLHLVFEFMETDLEALIKDKNIILSPADTKSYLQMLLKGLSFCHKKWVIHRDMKPNNLLIGADGQLKLADFGLARMFGSPGRNFTHQVFARWYRAPELLFGSKQYGSGVDIWAAGCIFAELLTRRAFLQGSSDIDQLGKIFAALGTPKSSQWPDMVYLPDYVEYQYVAAPPLRTLLPMASDDALDLLSKMLTYDPKARISAQQALEHRYFSSLPAPTRPSQLLRSRWKGDQGNNKMPDLNLQHGPLVLSPPRKLRRVIAHEWMEGMHRADKVDEHPSGMRHTDDMPSQKSSRIPMSVDVGAVFGTRPAPRPTLNSADKSRLKRKLDMDPEFGFAE

SEQ ID NO: 393 - protein, 1511 aa, Saccharomyces cerevisiae
MPEAKLNNNVNDVTSYSSASSSTENAADLHNYNGFDEHTEARIQKLARTLTAQSMQNSTQSAPNKSDAQSIFSSGVEGVNPIFSDPEAPGYDPKLDPNSENFSSAAWVKNMAHLSAADPDFYKPYSLGCAWKNLSASGASADVAYQSTVVNIPYKILKSGLRKFQRSKETNTFQILKPMDGCLNPGELLVVLGRPGSGCTTLLKSISSNTHGFDLGADTKISYSGYSGDDIKKHFRGEVVYNAEADVHLPHLTVFETLVTVARLKTPQNRIKGVDRESYANHLAEVAMATYGLSHTRNTKVGNDIVRGVSGGERKRVSIAEVSICGSKFQCWDNATRGLDSATALEFIRALKTQADISNTSATVAIYQCSQDAYDLFNKVCVLDDGYQIYYGPADKAKKYFEDMGYVCPSRQTTADFLTSVTSPSERTLNKDMLKKGIHIPQTPKEMNDYWVKSPNYKELMKEVDQRLLNDDEASREAIKEAHIAKQSKRARPSSPYTVSYMMQVKYLLIRNMWRLRNNIGFTLFMILGNCSMALILGSMFFKIMKKGDTSTFYFRGSAMFFAILFNAFSSLLEIFSLYEARPITEKHRTYSLYHPSADAFASVLSEIPSKLIIAVCFNIIFYFLVDFRRNGGVFFFYLLINIVAVFSMSHLFRCVGSLTKTLSEAMVPASMLLLALSMYTGFAIPKKKILRWSKWIWYINPLAYLFESLLINEFHGIKFPCAEYVPRGPAYANISSTESVCTVVGAVPGQDYVLGDDFIRGTYQYYHKDKWRGFGIGMAYVVFFFFVYLFLCEYNEGAKQKGEILVFPRSIVKRMKKRGVLTEKNANDPENVGERSDLSSDRKMLQESSEEESDTYGEIGLSKSEAIFHWRNLCYEVQIKAETRRILNNVDGWVKPGTLTALMGASGAGKTTLLDCLAERVTMGVITGDILVNGIPRDKSFPRSIGYCQQQDLHLKTATVRESLRFSAYLRQPAEVSIEEKNRYVEEVIKILEMEKYADAVVGVAGEGLNVEQRKRLTIGVELTAKPKLLVFLDEPTSGLDSQTAWSICQLMKKLANHGQAILCTIHQPSAILMQEFDRLLFMQRGGKTVYFGDLGEGCKTMIDYFESHGAHKCPADANPAEWMLEVVGAAPGSHANQDYYEVWRNSEEYRAVQSELDWMERELPKKGSITAAEDKHEFSQSIIYQTKLVSIRLFQQYWRSPDYLWSKFILTIFNQLFIGFTFFKAGTSLQGLQNQMLAVFMFTVIFNPILQQYLPSFVQQRDLYEARERPSRTFSWISFIFAQIFVEVPWNILAGTIAYFIYYYPIGFYSNASAAGQLHERGALFWLFSCAFYVYVGSMGLLVISFNQVAESAANLASLLFTMSLSFCGVMTTPSAMPRFWIFMYRVSPLTYFIQALLAVGVANVDVKCADYELLEFTPPSGMTCGQYMEPYLQLAKTGYLTDENATDTCSFCQISTTNDYLANVNSFYSERWRNYGIFICYIAFNYIAGVFFYWLARVPKKNGKLSKK

SEQ ID NO: 394 - protein, 590 aa, Arabidopsis thaliana
MSLPETKSDDILLDAWDFQGRPADRSKTGGWASAAMILCIEAVERLTTLGIGVNLVTYLTGTMHLGNATAANTVTNFLGTSFMLCLLGGFIADTFLGRYLTIAIFAAIQATGVSILTLSTIIPGLRPPRCNPTTSSHCEQASGIQLTVLYLALYLTALGTGGVKASVSGFGSDQFDETEPKERSKMTYFFNRFFFCINVGSLLAVTVLVYVQDDVGRKWGYGICAFAIVLALSVFLAGTNRYRFKKLIGSPMTQVAAVIVAAWRNRKLELPADPSYLYDVDDIIAAEGSMKGKQKLPHTEQFRSLDKAAIRDQEAGVTSNVFNKWTLSTLTDVEEVKQIVRMLPIWATCILFWTVHAQLTTLSVAQSETLDRSIGSFEIPPASMAVFYVGGLLLTTAVYDRVAIRLCKKLFNYPHGLRPLQRIGLGLFFGSMAMAVAALVELKRLRTAHAHGPTVKTLPLGFYLLIPQYLIVGIGEALIYTGQLDFFLRECPKGMKGMSTGLLLSTLALGFFFSSVLVTIVEKFTGKAHPWIADDLNKGRLYNFYWLVAVLVALNFLIFLVFSKWYVYKEKRLAEVGIELDDEPSIPMGH

SEQ ID NO: 395 - protein, 584 aa, Oryza sativa
MDSSYQHDKPLLDEENSSQVTLEYTGDGSVCIRGHPALRKHTGNWKGSSLAIVFSFCSYLAFTSIVKNLVSYLTKVLHETNVAAARDVATWSGTSYLAPLVGAFLADSYLGKYCTILIFCTIFIIGLMMLLLSAAVPLISTGPHSWIIWTDPVSSQNIIFFVGLYMVALGYGAQCPCISSFGADQFDDTDENERTKKSSFFNWTYFVANAGSLISGTVIVWVQDHKGWIWGFTISALFVYLGFGTFIFGSSMYDFRNLEEAPLARICQVVVAAIHKRDKDLPCDSSVLYEFLGQSSAIEGSRKLEHTTGLKFFDRAAMVTPSDFESDGLLNTWKICTVTQVEELKILIRMFPVWATMILFAAVLDNMFSTFIEQGMVMEKHIGSFEIPAASFQSIDVIAVLILVPVYERVLVPVFRKFTGRANGITPLQRMGIGLFFSMLSMVSAALVESNRLRIAQDEGLVHRKVAVPMSILWQGPQYFLIGVGEVFSNIGLTEFFYQESPDAMRSLCLAFSLANVSAGSYLSSFIVSLVPVFTAREGSPGWIPDNLNEGHLDRFFWMMAGLCFLNMLAFVFCAMRYKCKKAS

SEQ ID NO: 396 - protein, 243 aa, Synechocystis PCC6803
MTGKVYLVGAGPGDPEYLTLQAQQCLQSAEVLIYDALIDPRILDLVPANCDRIAVGKRGGAESTPQATINQLLVEHCQQGRKVIRLKSGDPFVFGRAASELDALERSGCDYAVLPGLSTALAAPLLAGIPITDPVLSRGFAVYTVHEPDALNWEALAQLETLILLMGSRHLLTIGHELIRHGRSPDSPVALIQWAGHPQQTVLESSLSRMAQQWGDQPLSPCVIVIGEVVRLRKYWAHYRYDG

SEQ ID NO: 397 - protein, 476 aa, Xylella fastidiosa
VTANVLFPLFANLHDRAVLVVGGGKVAERKTEALLKVGALPIIGAPSLTASLQHWAETGRITWRQGTFENSWLQEDIWLVIAATDQPEVNHAAARAAHAQRLFVNVVDDIALSNVQVPAVVERGPLRIAISSGGGAPMVARYLRQQLESLIDDSWGRLTTLFAQRRDTIRARYPNIEARRRFFETQLTGPLQRLLRKQRHAEAEAVLEAALAETPPTGSGSVTLVGAGAGDAGLLTLNALRALNEADIILYDRLVSDTVLQVARRDAEQIEVGKSATGHSVRQEDIHSLMLQHARAGQRVVRLKGGDPFVFGRGGEELEFLRTHNIPYEVIPGITAALACAAYAGIPLTHRDHAQSLCLITAHCQSSLDTLDWAALAQERQTLAFYMGVAGLPTIQQRLCEAGRAETTPFALIENGARAQQRVLTGTLKTLAHTAQTYAVRPPALLILGEVTTLAEHLHWFGTAPLSAPCPPALIL

SEQ ID NO: 398 - protein, 423 aa, Zea mays
MALAVRTPRFQPRPASISAPTTPASTSLAAGNARPRPCAGAAVRASPFTEATSSSRYRRDAWSYAADGSSNSASPSSAAAAAAGRRDDEIALQLPELRRLLDVLRASRGRGAEEGGGPGEVALVGTGPGDPELLTLKAVRAIEAADLVLYDRLVSNDVLDLVGEGARLLYVGKTAGYHSRTQEEIHELLLSFAEAGANVVRLKGGDPLVFGRGGEEMDFLQQQGIKVEVIPGITSASGIAAELGIPLTHRGVATSVRFLTGHSRNGGTDPLYVAGNAADPDTTLVVYMGLSTLPSLAPKLMKHGLPPDTPAVAVERGTTPQQRTVFASLKDLVDEVKSADLVSPTLIIIGKVVSLSPFWVESSEHDALKVQSSYANEADDNRFSWFLVTGQYLRNARSQIWEHRFDLVYTETSQEAWILNGGW

SEQ ID NO: 399 - protein, 195 aa, Zea mays
MASHQDKASYQAGETKARTEEKTGQAVGATKDTAQHAKDRAADAAGHAAGKGQDAKEATKQKASDTGGYLGKKTDEAKHKAGETTEATKQKASETTEATKQKAGETTEAARQKAADAMEAAKQKAAEAGQYAKDTAVSGKDKSSGVIQQATEQVKSAAAGAKDAVMSTLGMGGDDKQGDANTNTNKDSSTITRDH

SEQ ID NO: 400 - protein, 129 aa, Zea mays
MAARSSSSQPQLVAAAAVLAAALLLLAAGAGTASAAVSCGEVTSSVAPCLGYAMGSAASPSAACCSGVRSLNSRASSAADRQATCNCLKSMTGRLGGGVSMANAANIPGKCGVSVGVPISPTVDCTKIN

SEQ ID NO: 401 - protein, 233 aa, Glycine max
MFLTRSALFRFSKSLPYAPSLSLKPSMVTFSSTPNSGWRNAAEGGRRDGRTNWTYDSAEARREADEMSESAKETMNEGYDRAKDQAREAKDRTKDFAHDAKEKTNQPQSHQVSTILPLLTTKPVPRSESTQIMVLRRRKKQKMQRRKKLESTQIMLRRRRRKRRTRQWKRLESTLIMLRRRRRKRRTRQWRRLESTQIMLRRRRKKPRTRQWRREGNIKTMLQRRLKKEKMLL

SEQ ID NO: 402 - protein, 226 aa, Glycine max
MASYQKHYDDQGRKVDEYGNVEKQTDEYGNPVHAASVTYVATRTAAGGYSDDINKQHDTTNAYGVDTGRQHSSGGYDGDTNKHHGTTGGYNDDTNRHHGTTGVYGIDTDRQQHGTTGGYAGDTGRQHGNIGGPYYGTNTADTGTGPRSGTTGGTGYGGTGGTDYGTTGGTGYGSGTGYGVNTGGAHTEAGYRKEHRQHDQSHGDQNEKKGIMDKIKEKLPGGHSDK

SEQ ID NO: 403 - protein, 156 aa, Zea mays
MAASDVEYRCFVGGLAWATDDHSLHNAFSTYGEVLESKIILDRETQRSRGFGFVTFSTEEAMRNAIEGMNGKELDGRNITVNEAQSRGGRGGGGGGYGGGRGGGGYGGGGRRDGGGGYGGGGGGYGGGGGYGGGGGGYGGGNRGGGYGNSDGNWRN

SEQ ID NO: 404 - protein, 167 aa, Zea mays
MEYGQQGQRGHGATGHVDQYGNPVGGVEHGTGGMRHGTGTGGMGQLGEHGGAGMGGGQFQPAREEHKTGGILHRSGSSSSSSSEDDGMGGRRKKGIKEKIKEKLPGGHKDDQHATATTGGAYGQQGHTGSAYGQQGHTGGAYATGTEGTGEKKGIMDKIKEKLPGQH

SEQ ID NO: 405 - protein, 290 aa, Zea mays
MEDERNTQQHQGGEAQQDAADQVDVKDRGLLDSLLGRKKHDDDQEKKKQTDELATGMEKVTVSEPEKHGHKEEEHEVVGEKKEGLLAKLHRTSSSSSSSSDEEEEAIDENGEIIKRKKKKMGLKEKLKEKLPGHKDGHHTAAPSPAPAPVETHAHHQEEAHRPHVVPTPAPPPPPHVHQHDHGVVVQDDVKTGTPPHAPEEEKKGLLDKIKEKLPGGHNKKPEAAAAAAPAPPVHAPAPAPQAENVSSPDGKEKKGLLGKIMDKIPGYHKSSAEEADHKADAAGEHRTSS

SEQ ID NO: 406 - protein, 168 aa, Saccharomyces cerevisiae
MSNLLNKFADKLHGNDHDERYEDDNDDQTRQQRHEKHQQREFRNQGSKADPYGEENQGNFPQRQQPQSNLGGNTQFGGNDFQQQTTDYTAGTGGGTYTQTYRETNTQGQLDDDEDDDFLTSGQQQKQGRTRGAQSNRYQSSNIGSGRRDLSGSGNDEYDDDSGNQGVW

SEQ ID NO: 407 - protein, 84 aa, Saccharomyces cerevisiae
MTRTNKWTEREGKADPKYFSHTGNYGESPNHIKKQGSGKGNWGKPGDEIDDLIDNGEIPPVFKKDRRGSNLQSHEQKFENVQKE

SEQ ID NO: 408 - protein, 159 aa, Saccharomyces cerevisiae
MSNMMNKFAEKLQGNDDSHQKGKNAKSSNKERDDMNMDMGMGHDQSKGMKMGHDQSGTKMNAGRGIANDWKTYEHENMYVFGALTKSSYFFNGLFMNCLCLCSLYSKSISAYFSEFSSTNIYKSYLRLPSVLYYVCMMHTMMPNQLDAVGIQSSESLLM

SEQ ID NO: 409 - protein, 128 aa, Saccharomyces cerevisiae
MSANDYYGGTAGEKSQYSRPSNPPPSSAHQNKTQERGYPPQQQQQYYQQQQQHPGYYNQQGYNQQGYNQQGYNQQGYNQQGYNQQGYNQQGHQQPVYVQQQPPQRGNEGCLAACLAALCICCTMDMLF

SEQ ID NO: 410 - protein, 109 aa, Saccharomyces cerevisiae
MSDAGRKGFGEKASEALKPDSQKSYAEQGKEYITDKADKVAGKVQPEDNKGVFQGVHDSAEKGKDNAEGQGESLADQARDYMGAAKSKLNDAVEYVSGRVHGEEDPTKK

SEQ ID NO: 411 - protein, 344 aa, Zea mays
MGILCLGASSTLLCGEDRNNVLGLGCGNELVEVGSGHDGLDSVVGAVFPVDTDEAVRALLEKETDHKPQDGYAERLERGGLEYSWRRDAMDWICKVHSYYRFGPLSLYLAVNYLDRFLSSYDLPHDKPWMRQLLSVACLALAVKMEETVLPLPVDLQVCDVKFEFEARTIGRMELLVLATLKWRMQAVTPFTFISYFLDKFNGGKPPSMALASRCTEIIIGTLKGSTFLSFRPSEIAAASALAAVSENQVVGSSSALSASEVPINKEMIARCYELLQEQALVRKTGHINGSPSVPQSPIGVLDATCFSFRSEDVRLGSSQSNNISSSSNDNQVSKRRRLSISPI

SEQ ID NO: 412 - protein, 419 aa, Oryza sativa
MENMRSENFNQGVSMEGVKHAPEMANTNRRALRDIKNIIGAPHQHMAVSKRGLLDKPAAKNQSGHRPMTRKFAATLANQPSIAPLAPIGSERQKRTADSAFHGPADMECTKITSDDLPLPMMSEMDEVMGSELKEIEMEDIEEAAPDIDSCDANNSLAVVEYVDEIYSFYRRSEGLSCVSPNYMLSQNDINEKMRGILIDWLIEVHYKLELLDETLFLTVNIIDRFLARENVVRKKLQLVGVTAMLLACKYEEVSVPVVEDLILICDRAYTRTDILEMERMIVNTLQFDMSVPTPYCFMRRFLKAAQSDKKLELMSFFIIELSLVEYEMLKFQPSMLAAAAIYTAQCTINGFKSWNKCCELHTKYSEEQLMECSKMMVELHQKAGHGKLTGVHRKYSTFRYGCPAKSEPAVFLLKSVAL

SEQ ID NO: 413 - protein, 257 aa, Oryza sativa
MAANFWTSSHCKQLLDQEDVDKVPQADSDRGITLEEFRLVKIHMSFHIWRLAQQVKVRQRVIATAVTYFRRVYTRKSMTEYDPRLVAPTCLYLASKVEESTVQARLLVFYIKKMCASDEKYRFEIKDILEMEMKLLEALDYYLVVYHPYRPLLQLLQDAGITDLTQFAWGIVNDTYKMDLILIHPPYMIALACIYIASVLKDKDITLWFEELRVDMNIVKNISMEILDFYDTYKIDPQRGLPEDKIAPVMNKLPSKA

SEQ ID NO: 414 - protein, 420 aa, Oryza sativa
MDRASENRRLAAVGKPVPGIGEMGNRRPLRDINNLVGAPSHPSAIAKKPMLEKSGKEEQKPALVVSHRPMLRNFAASLTRKEQLDHQVSVADAAVVCTDPQKNPIPDGTVDDDVESCESNDYIAVDECNDTDEDESMMDIDSADSGNPLAATEYVEELYKFYRENEEMSCVQPDYMSSQGDINEKMRAILIDWLIEVHHKFELMDETLFLTVNIVDRFLEKQVVPRKKLQLVGVTAMLLACKYEEVAVPVVEDLVLISDRAYTKGQILEMEKLILNTLQFNMSVPTPYVFMRRFLKAAQSDKQLQLLSFFILELSLVEYQMLKYRPSLLSAAAVYTAQCALTRCQQWTKTCELHSRYTGEQLLECSRMMVDFHQKAGAGKLTGVHRKYSTFKFGCAAKTEPALFLLESGAGGYNLQKQPC

SEQ ID NO: 415 - protein, 508 aa, Oryza sativa
MSSNLAASRRSSSSSSVAAAAAAKRPAVGEGGGGGGGKAAAGAAAAKKRVALSNISNVAAGGGAPGKAGNAKLNLAASAAPVKKGSLASGRNVGTNRASAVKSASAKPAPAISRHESATQKESVLPPKVPSIVPTAALAPVTVPCSSFVSPMHSGDSVSVDETMSTCDSMKSPEFEYIDNGDSSSVLGSLQRRANENLRISEDRDVEETKWKKDAPSPMEIDQICDVDNNYEDPQLCATLASDIYMHLREAETRKRPSTDFMETIQKDVNPSMRAILIDWLVEVAEEYRLVPDTLYLTVNYIDRYLSGNEINRQRLQLLGVACMLIAAKYEEICAPQVEEFCYITDNTYFRDEVLEMEASVLNYLKFEVTAPTAKCFLRRFVRVAQVSDEDPALHLEFLANYVAELSLLEYNLLSYPPSLVAASAIFLAKFILQPTKHPWNSTLAHYTQYKSSELSDCVKALHRLFSVGPGSNLPAIREKYTQHKYKFVAKKPCPPSIPTEFFRDATC

SEQ ID NO: 416 - protein, 423 aa, Oryza sativa
MASRRQWGAGAGAVDVPAQERKGEAAKIARRPKTTTVVAQQPPRIRRALADVSNLVNGRAALPVVNRQKAAAAAADKCRKPIKQRNENNKAAKPEVIVISSDSEKHKKNPAQRAASRRAPIQTLTSILTKCSRASDGVISPKKELIYDIDASDSHNELAVVDYVEDIYRFYRNTENTYRPLCTYMVSQTEINERMRAILTDWLIEVHYRLMLMPETLYLTVYIIDQYLSLENVPRKELQLVGVSAMLIACKYEETWAPLVKDFLVISDNSFSRQQVLSTEKSILNKLQWNLTVPTMYMFILRYLKAALGDEELEHMTFFYAELALVQYSMLFFAPSVIAAAAVYAARCTLGLSPLWSDLLEYHTGLAEPQLLECARRLVSLHAAAPESRQKVVYKKYASPKLGAVSLHSPAKKLLPPPSPVAA

SEQ ID NO: 417 - protein, 372 aa, Zea mays
MENSAAAAAARPRLTRAAAKRSAVVTAVAVAAKRKRVALSQLPTLPNAVLGAHDDDDDKPVRKQRLLPAAKPKPKPKAAPAPAAPAAADDTDDDIQLCKPYASDIYSYLRSMESQAKRRLAVDYIAAVQIDVTPNMRGILIDWLVEVAEEYKLVSDTLYLTVSYIDRFLSAKVLNRQKLQLLGVSAMLIASKYEEISPPNVEDFCYITDNTYTKQEVVKMESDILNVLKFEVGSPTAKTFLRMFIRSAQEDNKKYPSLQLEFLGSYLSELSLLDYGLIRSLPSLVAASAVFVARLTLDPHTHPWSKKMQTLTGYKPSELKDCVAAIHNLQLNRTCQSMVAIREKYRQHRFKGVSALLPPVEIPASYFNTLKE

SEQ ID NO: 418 - protein, 424 aa, Zea mays
MAARAADENRRPAAGKPAPGVRDMASRRALTDIKNLVGAAPYPYAVAKKPMLQKSKRDEKQPALASSRPMTRKFAASLASKGQPECQPIVADPEPEVCQQKESVGDGTVDIDVELYELVDGSDSDIDMGATENKDIMNEDELLMDIDSADSGNPFAATEYVKELYTFYRENEAKSCVRPDYMSSQQDINSKMRAILIDWLIEVHYKFELMDETLFLMVNIIDIFLEKEVVPRKKLQLVGVTAMLLACKYEEVSVPVVEDLVLISYRAYTKGQILEMEKLILNTLQFNMSVPTPYVFMKRFLKAADADKQLELASFFMLELCLVEYQMLNYRPSHLAAAAVYTAQCAINRCQHWTKVCESHSRYTSDQLLECSRMMVDFHQKAGTSKLTGVHRKYSTYKFGCVAKILPAQFLLESGGTPPPSGAN

SEQ ID NO: 419 - protein, 479 aa, Zea mays
MECARELRVRSTFTAAAMASKKQVGPGGAVPAQEQMNGGDAARLVRKPMDTFPQPAAARGRRALVDVGNLMNGRPSLVNHQKQAVAAAATSHKPLNVGNKKPLVPQAAARGLRPLADVTNLMIKDRAAPANRQKPVDAVFNRNGKAVKLKECKVKPEVIVIIPDSEKEKKGKFPGGQRVCRRVPTLFDNLTKCSRASDGITTPKKKDPYDIDAPDSCNELAVVEYVEDIYRFYKSTEGTCLPLSSYMSSQAEISERMRAILIDWIIEVQYRLTLMPETLYLTVYIIDQYLSMESVPRKELQLVGISAMLIASKYEEIWAPLVKDLMCLCDNAFTRDQILTKEKAILDMLHWNLTVPTMYMFIVRYLKAAMCDAELENMTFFYSELALVQYAMLVYPPSVTAAAAVYAARSTLGMNPQWTDILEHHTGLAEPQLLDCARRLISFHALAPESKQKAVYRKYSKPKLGSVALQSPDKKLLSG

SEQ ID NO: 420 - protein, 442 aa, Zea mays
MASRNHNAAAPQLHHHNRAGVPALGKAKAVPARADALNRRPPLGDIGNLVSVRPATGNPQEQVNRPITRSFGAQLVKKAQAKAAIKNAAILPARHAPRQERKAPVKQQPPPEDIIVLSSDSEQSRAQSESSASSVRSRRKAINTLSSVLSARSKAACGIAGKPRQVVDDIDKLDVNNELAVVEYIEDIYTFYKIAQHERRPCDYIDAQLEINSKMRAILADWIIEVHHKFELMPETLYLTMYIIDQYLSLQPVLRKELQLVGVSSMLIACKYEEIWAPEVNDFILISDSAYSREQILSMEKGILNRLEWNLTVPTVYMFLVRFLKAATLGGKVEKEMENMVFFFAELALMQYDLVTRLPSLVAASAVYAARLTLKRAPLWTDTLKHHTGFRESEAELIECTKMLVIAHSTAPESKLRVVYKKYSSEQFGGVALRPPAEEICK

SEQ ID NO: 421 - protein, 387 aa, Zea mays
MAAFAALFDPLYCPEEHLDLYHEGPVEVVDEQWQDQRGQQQPAALDDELPALFEALRDKEGVVLAGDGEEDGYGGSAGREAAVGWASRAAARLGFSALTSALSAAYLDRCFLPGGALRLGDQPWMSRLAAVACVALAAKVEETRVPLLLDLQLCAAASSDADAADADVFEAKTVRRMELLVLSALGWRMHPVTPFSYLQPVLADAAMRLRNCEAVLLAVMADWRWPRHRPSAWAAAALLTTAGGGDDDSELLALINAPEDETAECAKIISEVTGMSFLVCDVGGMIAGNKRKHAAARMYSPPLSPSGVIGALSCFSCESSLSATADSRTLATTAAGVGPWAPSAPVSVSSSPEPPGRAPKRAAAAGVPHPLPPDEESRDAWPSTCAA

SEQ ID NO: 422 - protein, 321 aa, Zea mays
MPGDAYDLLCAEDDAAGSALLCTTDDDDGCCSAVEEDSAAAAASIAELIGGEAQYSPRPDYPDRLRSRSIDPAARAESVAWILKVQEYYGFLPLTAYLAVNYMDRFLSLHRLPEDGWAMQLLAVTCLSLAAKMEETLVPSLLDLQVEGTSRYDCFEPGTVGRMELLVLMALNWRLRSVTPFTFVDFFACKVDPGGRHTRCLIARATQVILAAMHDVEFLDHCPSSMAAAAVLCAIGETPSLESVSPGAAVSWCIGLAEEGISSCYRLMQRLVIGNVRTRVASTTTMAAVNLCCSDEALSSHSSATSSPPPAKRRKRSPTAT

SEQ ID NO: 423 - protein, 349 aa, Zea mays
MGDAAASTSAPTTPTSILICLEDGSDLLADADDGAGTDLVVARDERLLVVDQDEEYVALLLSKESASGGGGPVEEMEDWMKAARSGCVRWIIKTTAMFRFGGKTAYVAVNYLDRFLAQRRVNREHAWGLQLLMVACMSLATKLEEHHAPRLSEFPLDACEFAFDRASVLRMELLVLGTLEWRMVAVTPFPYISCFAARFRQDERRAVLVRAVECVFAAIRAMSSVEYQPSTIAVASILVARGRETPAGNLDALKAILGSSFPQLDTGHVYSCYSAMIREDDKSPTQSTSTSTGVASSGVSVAAHAGGSGSPSPPGASVSVGANNAAGTAPPATTDNRNKRRRLRSPQRQ

SEQ ID NO: 424 - protein, 445 aa, Zea mays
MATRNHRAAAAPQPANRGAARVAGKQKAAAAGTRRALGDIGNVVSDALDRAIKLPEGIHRPITRSFGAQLMKAALANKNADAAVAPAQPVAARAVTKPARKVTTKNVPRPGAGQAPKENKKPSAEGAAAASGRSVQKNRRKKPACTLSTVLSARSKAACPVTEKPKEPIEDIDKFDGDNQLALVDYVEDIYTFYRPPMHESRPIDYMGQTSPELSPRMRSILADWLIESHRRFQLMPETLYLTIYIVDRYLSLQPTPRRELQLVGVAALLIACKYEEIWAPEVNDLIHIADGAFNRSQILAAEKAILNSMEWNLTVPTPYHFLLRFAKAAGSADEQLQHTINFFGELALMDYGMVMTNPSTAAACAVYAARLTLGRSPLWTETLKHHTGPQRAADTGRAKTLVGSHAASASPDARLKAVYQKYATEQFGRVALHPPAPAALPDLV

SEQ ID NO: 425 - protein, 391 aa, Zea mays
MAAFAALFDPLYCPEEHLDLYRDEPGEGADEQWPGQHGQQEPAVLDDELPALFEAHRAKEGVVLAEDGGYGGAAGREAAVGWVSRAAARLGLSALTAALAAAYLDRCFLPGGALRLGDQPWMARLAAVTCFALAAKVEETRVPPLLDLQLYAAADAADPYVFEAKTVRRMELLVLSALGWRMHPVTPFSYLQPVLADAATRLRSCEGVLLAVMADWRWPRHRPSAWAAAALLITAAAGDGGDGDGDTELLALINAPEDKTAECAKIISEVTGMSFLACDVGVSAGNKRKHAAAQLYSPPPSPSGVIGALSCFSCESSTSATAMAAAVGPWAPSASVSVSSSPEPPGRAPKRAAAASASASASAGVAPPVQVPHQLPPDEESRDAWPSTCAA

SEQ ID NO: 426 - protein, 349 aa, Zea mays
MGERGAEEDGSGGSSLSLMCLEDGADLDAGGSAESADDGEPAVVAHSDAGEDQEEEYMDYLVSKESSFCCSPSSSPVSSDAGAETRPSSTASSSDEWFRCARHATVAWVLETRAYFGFSHRAAYLAVSYMDRFCLRRCMDVSVMPWAARLLAVACLSLAAKMEEYRAPALSEFRAHDDYDFSSVCIRRVELLVLSTLGWRMGGVTPLDYLPCLSFRLRRGGGGGLIAAKAAALIFSAAEAASVLDYRPSTVAVAAVLAAAHGAMTKEALECNMSSLTPSCLLDKDDVHACYSTMLSESSSPTPSKLADKRPPPSSSGSTMYESVDAASSFAATAGRSKRARLEMPAIGP

SEQ ID NO: 427 - protein, 509 aa, Zea mays
MSTIAASRRSSSSSSSATAKRPAIADGPGGPKATAAQAKKRVALGNITNVAARGGRASVGGSLGNVMAPTSSAKLNPTVPLKKPSLATSARSVSSSIRGSADKPASIKPAPPVARHGSATQRHNNVPPPKVPTIADVPSRAPALVSCTGLVSPGRSGDSVSSDETMSTCDSMKSPDFEYVDNQDTSMLASLQRRTSEHLRISEDRDVEENKRKKNAVAPMEIDRICDVDSEYEDPQLCATLASDIYMHLREAETKKRPSTDFMETIQKDVNPSMRAILIDWLVEVAEEYRLVPDTLYLTVNYIDRYLSGNEISRQRLQLLGVACMLIAAKYEEICAPQVEEFCYITDNTYFRDEVLDMEASVLNYLKFEMTAPTAKCFLRRFARAAQACDEDPALHLEFLANYIAELSLLEYSLLSYPPSLIAASAIFLARFILQPTKYPWNSTLAHYTQYKPSKLSECVKALHRLCSVGSGSNLPAIREKYSQHKYKFVAKKQCPPQIPTEFFRDTTC

SEQ ID NO: 428 - protein, 349 aa, Zea mays
MMPVAAVDDWSERGFSLTCEEDCADLGNGVVDDDEFLPLYNAGEEEEEEYLEQLVFKETSLCSSSDSAADCDGDGEGDEEYPSLASEEWFRQARLAAVKWILETRGCFGFGHRTAYLAIAYFDSFLLRRRVDREAMPWAAQLLSVACVSVAAKMEECQVPALSEFHAGGYDFDSASIRRMELLVLSTLGWRMGAVTPLDFLPCFSSRVHPHGGAGAGGHVAHKAIGFIFATAEAGSVLDHRPSTVAAAAILAATYGPLLTKEALDSKMSYLSPSCLIEKEHVHACYSMMVGDNNRRGSKRSLPCSVSNEIATSTYHSVLVDDVTDTAAAFATAVSARNKRIRLELTGIS

SEQ ID NO: 429 - protein, 424 aa, Zea mays
MENLRSQNCHQGVAMEGVKFAPEKANTNRRALSDIKNIIGGPHQHLAVSKRALSEKPAAAAAANAKDQAGFVGHRPVTRKFAATLATQPTVALLDPIGSERLKRNADTAFHTPADMESTKMTDDSPLPMVSEMDEMMSPELKEIEMEDIEEAAPDIDSGDAGNSLAVADYVDEIYRFYRKTEGASCVPTNYMSSQTDINEKMRGILIDWLIEVHYKLELLEETLFLTVNIIDRFLARENVVRKKLQLAGVTAMLLACKYEEVSVPVVEDLILIGDRAYTRADILEMERRIVNTLNFNMSVPTPYCFMRRFLKAAQSEKKLELLSFFMIELSLVEYEMLQFCPSMLAAAAIYTAQCTINGFKSWNKCCELHTRYSEEHLMVCSRMMVELHQRAAHGKLTGVHRKYNTSRYSYAAKSEPATFLLDA

SEQ ID NO: 430 - protein, 356 aa, Oryza sativa
MGVLCFGASNILLCAEDSSSVLGLGGFGGGGGEVAAELGCGGGGGFDFFGFGGGAVFPIDSDEFVALLVEKEMDHQPQRGYLEKLELGGLECSWRKDAIDWICKVHSYYNFGPLSLYLAVNYLDRFLSSFNLPHDESWMQQLLSVSCLSLATKMEETVVPLPMDLQVFDAEYVFEARHIKRMELIVMKTLKWRLQAVTPFSFIGYFLDKFNEGKPPSYTLASWCSDLTVGTLKDSRFLSFRPSEIAAAVVLAVLAENQFLVFNSALGESEIPVNKEMVMRCYELMVEKALVKKIRNSNASSSVPHSPITVLDAACFSFRSDDTTLGSSQSNSNNKDYNSQDSAPASKRRRLNTTPI

SEQ ID NO: 431 - protein, 328 aa, Oryza sativa
MAASAAAAAAVSQALRDRDVLDAVGTSAAALSLAGSSFIVLCYLLFRELRKFSFKLVYFLAVSDMFCSLFTIMGGPSNAFYCFAHDYSAHFFCVASFLWTTTIAFTLHRTVVKHKTDVEEFGSIFHLYVWGTSLATTVLRSIGSDYGRPGTWCWIQQGSMGKACDLLCFVLHLVTFYLPLWGAILYNGYTYFQVNRMINNATRMAVGISDRSIQSDVRADKKAFNRWGYYPLILIGSWAFATINRVHDFANPGHKIFWLSILDVGFAGLMGLFNSIAYGLNSSVRRAIAERLDMYLPERFKRSLPTLTRFKSQQENELTSLIVDASNT

SEQ ID NO: 432 - protein, 359 aa, Zea mays
MEEITQHFGVGASSHGHGHGQHHHHHHHHHPWASSLSAVVAPLPPQPPSAGLPLTLNTVAATGNSGGSGNPVLQLANGGGLLDACVKAKEPSSSSPYAGDVEAIKAKIISHPHYYSLLTAYLECNKVGAPPEVSARLTEIAQEVEARQRTALGGLAAATEPELDQFMEAYHEMLVKFREELTRPLQEAMEFMRRVESQLNSLSISGRSLRNILSSGSSEEDQEGSGGETELPEVDAHGVDQELKHHLLKKYSGYLSSLKQELSKKKKKGKLPKEARQQLLSWWDQHYKWPYPSETQKVALAESTGLDLKQINNWFINQRKRHWKPSEEMHHLMMDGYHTTNAFYMDGHFINDGGLYRLG

SEQ ID NO: 433 - protein, 242 aa, Zea mays
MGQGGEVKAAPAVRVLVVDDSPVDRKVVELLLRNHNHQGGAAPFHVTAVDSGKKAMEHLRLMEQGGQLDSCAADANRITIDIVLTDYCMPEMTGYDLLKAIKALSSPNPIPVVVMSSENEPQRISRCLTAGAEDFILKPLKTKDVQRLRNCSSAARPRDDAAHQCESLRRSSRKLRSDQVAAPGHRSQPTTGLTMVLHASSIELSHYFQFLLKFVLLAYAVLCLTELLHRWSNGSVLSLWSA

SEQ ID NO: 434 - protein, 686 aa, Zea mays
MAAAEARGGEFPVGMKVLVVDDDPTCLVVLKRMLLECRYDVTTCPQATRALTMLRENRRGFDVIISDVHMPDMDGFRLLELVGLEMDLPVIMMSADSRTDIVMNGIKHGACDYLIKPVRMEELKNIWQHVIRKKFNENKDHEHSGSLDDTDRNRPTNNDNEYASSANDGGDGSWKSQRKKREKEDDETDLENGDPSSTSKKPRVVWSVELHQQFVNAVNHLGIDKAVPKKILELMNVPGLTRENVASHLQKFRLYLKRIAQHHAGIPHPFVAPVSSANVAPLGGLEFQALAASGQIPPQALAALQDELLGRPTSSLALPGRDQSSLRVAAIKGNKHHEEREIAFGQPIYKCQNNAYGAFPQNSPAVGGLQPFAAWPNNKVGMTDSTSTLGNVGNSQNSNMLLHELQQQPDTLLLGTLHNIDAKPSGVVMPSQSLNTFPASEGISPNQNPLIIPSQPPSFVSSIPPSMKHESLLGLPSTSTSLLGGLDMVNQASTSQALISSHGTNLPGLMNRSSNAIPSPGISNFQSGNIHYVVNQNAMGVSSKPPGVLKTESTDSLSCSYGYIGGSTSVDSGLFSSQSKNPQYGLLQNQNDVNGSWSPSQDFDSFGNSLGQGHPGTTSSNFQSSALGKLPDQGRGRNHGFVGKGTCIPSRFAVDEVESPTNNLSHSIGNSGDIVNHDIFGFSGHM

SEQ ID NO: 435 - protein, 709 aa, Zea mays
MQQVDEHKEEQRQSIHWERFLPVKTLRVLLVENDDSTRQVVSALLRKCCYEVIPAENGLHAWRYLEDLQNNIDLVLTEVFMPCLSGIGLLSKITSHKICKDIPVIMMSTNDSMSMVFKCLSKGAVDFLVKPLRKNELKNLWQHVWRRCHSSSGSESGIQTQKCAKLNTGDEYENGSDSNHDDEENDDGDDDDFSVGLNARDGSDNGSGTQSSWTKRAVEIDSPQPISPDQLVDPPDSTCAQVIHPRSEICSNKWLPTANKRNVKKQKENKDESMGRYLGIGAPRNSSAEYQSSLNDVSVNPIEKGHENHMSKCKSKKETMAEDDCTNMPSATNAETADLISSIARNTEGQQAVQAVDAPDGPSKMANGNDKNHDSHIEVTPHELGLKRSRTNGATAEIHDERNILKRSDQSAFTRYHTSVASNQGGARYGESSSPQDNSSEAMKTDSTCKMKSNSDAAPIKQGSNGSSNNDVGSSTKNVAARPSGDRERVASPLAIKSTQHASAFHTIQNQTSPANLIGEDKADEGISNTVKMSHPTEVPQGCVQHHHHVHYYLHVMTQKQPSTDRGSSDVHCGSSNVFDPPVEGHAANYSVNGGVSVGHNGCNGQNGSSAVPNIARPNIESINGTMSQNIAGGGIVSGSGSGNDMYQNRFLQREAALNKFRLKRKDRNFGKKVRYQSRKRLAEQRPRVRGQFVRQSEQEDQTAQGSER

SEQ ID NO: 436 - protein, 631 aa, Zea mays
MGGGADEVVKVVDSEDGEGEEEEAEAAAAEGSSKETPMLPRMPVRVLLAEGDDSTRHVISALLRKCGYRVAAASDGVKAWDILKEKSFNIDLVLTEVELPLMSGFLLLSTIMEHDASKNIPVIMMSSHDSVSMVFKCMLKGAADFLVKPLRKNELRNLWQHVWRKQLANGGPDVQHIQEENLAERMEQKTGVTKADNLNSDGPHKNRECSEQESDAQSSCTRSELEAESKQTNNILEYMQSTERHLFIRSHKDLELNGETKTRTKGNNLIPTREDDLLPKKRTCLNDNDSERTSRDMELVHIMDNQQKHDTQRDVDTMRTTSRGNDEKNSIPAHQLELSLRRTDYGKLENHEKNDRRTLNHSTSSAFYLYNCRTASSLGNAGDGQLCSTSETLVDVENRNGDLAALSEDTTETNRPPIRVVPFPVPVQCFTFDGQPFWNGTPVASPFYPQSAPPIWNSKTPTWQESTPQATSLPQKSQQNEPVEMDAKPVENAEEQFVVGPPSASGKQLHVEIPKDGLRHISPVTGESGISTVLDSTRNTLSSSGCDSTSNRITASTEPSSNVYRGVPETARAEGLRHLSQREAALNKFRLKRKDRCFEKKVRYQSRKLLAEQRPRVKGQFVRQDHSIQGS

SEQ ID NO: 437 - protein, 631 aa, Zea mays
MTVDELKLQARASGGHGAKDQFPVGMRVLAVDDDPTCLKILENLLLRCQYHVTTTGQAATALKLLREKKDQFDLVISDVHMPDMDGFKLLELVGLEMDLPVIMLSANGETQTVMKGITHGACDYLLKPVRIEQLRTIWQHVVRRRSCDAKNSGNDNDDSGKKLQVVSAEGDNGGVNRNKRISRKGRDDNGDDGDDSDDNSNENGDSSSQKKPRVVWSVELHRKFVAAVNQLGIDKAVPKKILDLMNVENITRENVASHLQKYRLYLKRLSADASRQANLTAAFGGRNPAYVNMGLDAFRQYNAYGRYRPVPTTNHSQPNNLLARMNSPAFGMHGLLPSQPLQIGHNQNNLSTSLGNVGGMNNGNLIRGAHMPLQDTSKCFPTGPSGNSFANISNSTQLVTTNNLPLQSLEPSNQQHLGRLHSSADPFNSFVGEPPQFADLGRCNTTWPTAVSSSNVQEIGQKDRIVNRPKLEPLSSFTEASSQIPLLGSEMQSHQVASLASNGLPMPFTQEAVPFAYGSSTNSREMLNNNLALSNSGVNSTLPNLRIDGSVVPGQTLGGSNSGGCVVPPLQDGRIDHQAVSSHLNYNNELMGTGRLQRGLSGGLDDIVVDMFRPDRADDGVSFIDGDWELV

SEQ ID NO: 438 - protein, 584 aa, Zea mays
MALTDATAFPYGLRVLVVDDDPTWLKILEKMLRKCSYEVTTCGLASVAIQILRERRNKFDIVISDVNMPDMDGFKLLELIGLEMDLPVIMMSIDGETSRVMKGVQHGACDYLLKPVRMKELRNIWQHVYRKKMHEVKEIEGNDSYDDLQMFRNGVEGFDERDLFMRADSDTMRKRKDVNKDHADQDSSDGATVKKARVVWSVDLHQKFVNAVNQIGFDKVGPKKILDLMNVPGLTRENVASHLQKYRLYLSRLQKQNEERIMGAARQDFNQKGPSDHLNLRSSFQEQPGNLSNGCQHSSQKVEAQTNILDPHLDDTKTSMPLKVPDKNGISASDAVDPHNITTASPLSGVFSFERMPVNQDRKLSETMILECESWSGSVPPKQFMQYPKHNHERCDLLGDYSCLPKPDLEHPIAPGHLYAPPPVISMSYNVEKDVRDFSDVKPDLLGCMKSLSPALTCTVESVSAQLSDSVVTSTNSDRKFSSVEGLSSIKDCDFDQERNGAILFTSEEASILCGTDFTCLPEDLSGYQLQGVSFGNKGLNSIDLYQCNDTMLIPGLQNNWYDDDVEFSSETVEFPLLDGGLFA

SEQ ID NO: 439 - protein, 242 aa, Zea mays
MTVPDAESRFHVLAVDDSLVDRKLIEMLLKTSSYQVTTVDSGSKALELLGLRDASSPSPSSPDHQEIDVNLIITDYCMPGMTGYDLLKRVKGSSSLKDIPVVIMSSENVPARISRCLQDGAEEFFLKPVKLADMKKLKSHLLKRKQPKEAQAQAQAQAQQGQAVELEPEQQLDPRTQPAHDAEETAAEPPPAASNGTTDGGNKRKAAAMEEEGMLAVMTVAAPESSTKPRLSTTTSSLAVET

SEQ ID NO: 440 - protein, 244 aa, Zea mays
MEAGGAGAEGVMRVLLVDDSPVDRRVAQLLLSSNSCAGSFHVIAVDSAKKAMEFLGLKDGGKEQAIDMVLTDYCMPEMTGYDLLKAIKALNPLKPIPVIVMSSEDEPQRISRCLNAGAEDFIVKPLQSKDVQRLRNCSTVGRPSNKGGATLPCEENAVAKWSNNKLPPSAGAGAGASATSPSGRRANLAGVAMRQVLHSSSVEISQYLPLLLKLVVLAYAALCLGELLHRWSSGGSCSLSPWCA

SEQ ID NO: 441 - protein, 235 aa, Zea mays
MPSQSTHTSSSLSSSTAPILPCSSAAALFRSVMAAVATETPFHVLAVDDSLPDRKLIERLLKTSSFQVTTVDSGSKALQFLGLHDQDSTVPPVHTHQLDVAANQDVAVNLIITDYCMPGMTGYDLLKKIKESSSLRDIPVVIMSSENIPSRINRCLEEGADEFFLKPVRLSDMNKLKPHILKSRCNQEQHQQSDSHSGERRNPTISSSDSINNRKRKGAGTEEILPQLANRSRHS

SEQ ID NO: 442 - protein, 157 aa, Zea mays
MAAAATATPAVAPEAGDRKAVAPPVDAVDLELELEEKHVLAVDDSSVDRAVIAKILRSSKYRVTTVDSATRALELLALGLVPDVNMIITDYWMPGMTGYELLKHVKESSALRAIPVVIMSSENVPTRISRCLEEGAEDFLLKPVRPADVSRLCSRIR

SEQ ID NO: 443 - protein, 526 aa, Zea mays
MVGGGEGDRVGGGVGVGGGQQFVDRSKVRILLCDGDASSSREVLRLLCNCSYHVTCAKSPRQVINILNYEGGEIDIILAEVDLPVSKCFKMLKYIARNKDLRHIPIISRQPSYSEPLMSNRDEVSVVVKCLRLGAAEYLVKPLRTNELLNLWTHVWRRRRMLGLPEKNFFNDNFELVLSEPSDANTNSATLLSDETDDRPKENTNQETGTSNQLEYESNPSVAERDQRDKIGAPGSALDASQSSTPGRMFSRPIKTNLKVAESSAFLAYVKSSTPATSSFDSGLQRGDSRLDSLDNHGNCSSATDRSDTGTDVNIRNKEAFEMPVQYPMVCFSSSSMHMERSNEGHNDTSGTPPAYHFPFYYPGMVEHNMALSSVQNFQANINSAQAHTPPAMLHQYNVFSQCHSLPMISPFQFNTSGMSMHSSHLPTQNVWSSASSTPTPDETCNRSERRAAALAKFRQKRKERCFDKKVRYVNRKKLAETRLRVRGQFVRHASNMDIISTGDDISEDEDDDPTSREVDMISSPE

SEQ ID NO: 444 - protein, 321 aa, Zea mays
MAPAVSAAASAAMRQALRDRQILDAVGTGAAALSLAGSSFIVICYLLFRELRKFSFKLVFYLAVSDMFCSLFTILGGPSNAFYCFAHDYSAHFFCVASFLWTTTISFTLHRTVVKHKTDVEEFGSIFHLYVWGTSLSTTVLRSIGSDYGRPGTWCWIQQGSMAKVLHLITFYLPLWGAILYNGFTYYEVNRMLNNATQMAAGISDRSNQSDIRADRKAFNRWGYYPLILIGSWAFATINRLYDFANPGHRIVWLSFLDVGFAGLMGLFNSIAYGLNSSVRRAISERIDTFLPERIKRSLPALSRLRSQQENELTSLIVEGN

SEQ ID NO: 445 - protein, 491 aa, Zea mays
MAPSPPRRAALLLTTVLLLAAAGSTPGATAAGIFQVRRKFTAGVGGGAGANISALRAHDGTRHGRLLAAADLPLGGLGLPTDTGLYYTEIKLGTPPKHYYVQVDTGSDILWVNCITCEQCPHKSGLGLDLTLYDPKASSTGSMVMCDQAFCAATFGGKLPKCGANVPCEYSVTYGDGSSTIGSFVTDALQFDQVTRDGQTQPANASVIFGCGAQQGGDLGSSNQALDGILGFGEANTSMLSQLTTAGKVKKIFAHCLDTIKGGGIFSIGDVVQPKVKTTPLVADKPHYNVNLKTIDVGGTTLQLPAHIFEPGEKKGTIIDSGTTLTYLPELVFKEVMLAVFNKHQDITFHDVQGFLCFQYPGSVDDGFPTITFHFEDDLALHVYPHEYFFANGNDVYCVGFQNGASQSKDGKDIVLMGDLVLSNKLVIYDLENRVIGWTDYNCSSSIKIKDDKTGATSTVNSHDLSSGWKFHWHMSPVLLLVTTVCSYLIC

SEQ ID NO: 446 - protein, 510 aa, Zea mays
MAQLAVRSLLLSLLLVSPVVASPGIVKLNSSSTLFGIEFPPFNTAVAATGCDSKLVAADEAGDEQKQPASSSPSLQLRMKHRSAEGGRTRKESFLDKAEKDAVRIETMHRRAARSGVARMPASSSPRRALSERMVATVESGVAVGSGEYLIDVYVGTPPRRFRMIMDTGSDLNWLQCAPCLDCFEQRGPVFDPAASSSYRNVTCGDQRCGLVAPPEAPRACRRPAEDSCPYYYWYGDQSNTTGDLALESFTVNLTAPGASRRVDGVVFGCGHRNRGLFHGAAGLLGLGRGPLSFASQLRAVYGHTFSYCLVEHGSDAGSKVVFGEDYLVLAHPQLKYTAFAPTSSPADTFYYVKLKGVLVGGDLLNISSDTWDVGKDGSGGTIIDSGTTLSYFVEPAYQVIRQAFVDLMSRLYPLIPDFPVLNPCYNVSGVERPEVPELSLLFADGAVWDFPAENYFVRLDPDGIMCLAVRGTPRTGMSIIGNFQQQNFHVVYDLQNNRLGFAPRRCAEV

SEQ ID NO: 447 - protein, 478 aa, Zea mays
MSSPAVRRVVLLSSLLCAGALGFLPCSHAAAVAPGYVAVSAASFVPSSTCSSPDRVPPHRRNGTSAVLRLTHRHGPCAPSRASSLAAPSVADTLRADQRRAEYILRRVSGRAPQLWDSKAAAAVATVPASWGYDIGTLNYVVTASLGTPGVAQTMEVDTGSDLSWVQCKPCAAAPSCYSQKDPLFDPAQSSSYAAVPCGGPVCAGLGIYAASACSAAQCGYVVSYGDGSNTTGVYSSDTLTLSASSAVQGFFFGCGHAQSGLFNGVDGLLGLGREQPSLVEQTAGTYGGVFSYCLPTKPSTAGYLTLGVGGPSGAAPGFSTTQLLPSPNAPTYYVVMLTGISVGGQQLSVPASAFAGGTVVDTGTVVTRLPPTAYAALRSAFRSGMASYGYPTAPSNGILDTCYNFAGYGTVTLPNVALTFGSGATVTLGADGILSFGCLAFAPSGSDGGMAILGNVQQRSFEVRIDGTSVGFKPSSC

SEQ ID NO: 448 - protein, 346 aa, Glycine max
MTSLSTHHTYSRKQKSLGLLCTNFLSLYNKEGVRLVGLDDAASRLGVERRRIYDIVNVLESVGVLTRKAKNQYTWKGFCAIPAALQELKDEGLKENPGSFDDSNDNAKVSDDEEEEEETFPNINIGSQSEKENPDYTATVKSSKNENRREKSLALLTQNFVKLFVCSNFEMISLDEAAKLLLGNANNRTKVRRLYDIANVLSSMNLIEKTHTTNTRKPAFRWLGVRGKTWGGSVDLAQNSNVKESRKRMFGTDIGNISFKRNKVDLSMDGQNSKMQNQHENISPRAQLEKIIIKKDAKQTSESYQFGPFAPAYVPKVGTSENNSVKKVHDWDSLAQEHRPQYQNQG

SEQ ID NO: 449 - protein, 1043 aa, Zea mays
MFTPQGKGWTGWSTPTPANQRSGGGAPAASAPLGKGKGRVAELEQELHEYQYNMGLLLIEKKEWAAKFEEISEVLTQKEEILKREQAAHLNAISEYERREENMRKALGVEKQCVADLEKALRDIRAEIAEVKFTSEKKITDAQSLEASLEEKSLEIEGKLHAADAKLAEANRKKSQADRDLEEAEARQRRLEKEKLYFETERKAREKQLKEQEESLQEWEKKLKESQNRLNELQRSINEREERANKNDQLFKIKQDELEEARRTVEAAKVTLKVKEDDINKRLNELHLQEKDADSKRSALEEQGKKLDEREAKVTNREKEGLQKLLEDHQVELESKRRDFELELERERKSFDQNMTQKQADLLKREKDVKSLEAKLSKSEQALNDKKKSMENLQNDLDAKSKALKSWDESLKNDEKRLLKEKQQMDHEREQLETYKLELEKIKSALEAEKEKISEEQNNLKLTAQERQEHSLLIAKLKKEIEEYRMRSNSLSEEMEDLRKQRQKFEEEWEQLDEKRALLVEEDKRLNIERMNLERWRDNEEKRLNDMKLKMDEEYKQQLESLERKEKALSDDMKHKQMENDEFLKGERADVQRKLQLKRHELEMEMEQKQATKEKELEEKENELNKKIDFVENKLRHAIELNESKIEKLLLEKREVQMERELLLEERKKTETDKADIRRDIESLHSLSKSLKERREAYNRDRSRLIELFEKYKACKNCGISIFEGLDSLLLKDSAEIEHPSLAVEGDDHALTTDTSGPDTGTLVNSGGRFSLLQKCSRLFKFSPRKKGEQSSEQPSERNISFGARLEEATQSDGDYVPTPVYEIAHDSFNAEDELPSDGETRENEESERHDIADNAQMESSVGVADNSIDILGTKSFDGANDMAVEATIVSVDQNGEDSVVPAEAGVEPETSEQGRRQQNQRGRRKGGMKRTRSVNAVVEDAKMILGEVFEEKTDDQGDTVKVGATRKRRFAGATISEQDEEGSEAHSESVSLGGQRRKRRQTAGAVTDAPGERRYNLRHSRAANAGAATAQADKKKIFKSKK

SEQ ID NO: 450 - protein, 436 aa, Oryza sativa
MDSVVRTHIGHMLKMIHFCSMFLITFSDYKIQAILSSQQKRKAPEESDVAESSDCMITSPGFAVSPMLTPVSGKAVKTSKSKTKNNKAGPQTPTSNVGSPLNPPTPVGTCRYDSSLGLLTKKFINLLKQAPDGILDLNNAAETLEVQKRRIYDITNVLEGIGLIEKTLKNRIRWKGLDDSGVELDNGLSALQAEVENLSLKEQALDERISDMREKLRGLTEDENNQRWLYVTEDDIKGLPCFQNETLIAIKAPHGTTLEVPDPDEAGDYLQRRYRIVLRSTMGPIDVYLVSQFDEKFEDLGGGATPSGHANVPKHQPTEVFNTTNAGVGQCSNSVAVDNNIQHSQTIPQDPSASHDFGGMTRIIPSDIDTDADYWLISEGDVSITDMWKTAPDVQWDESLDTDVFLSEDVRTPSSHNQQPSAVGGPQMQVSDMHKP

SEQ ID NO: 451 - protein, 157 aa, Saccharomyces cerevisiae
MSDEEHTFENADAGASATYPMQCSALRKNGFVVIKGRPCKIVDMSTSKTGKHGHAKVHLVTLDIFTGKKLEDLSPSTHNLEVPFVKRSEYQLLDIDDGYLSLMTMDGETKDDVKAPEGELGDSMQAAFDEGKDLMVTIISAMGEEAAISFKEAPRSD

SEQ ID NO: 452 - protein, 387 aa, Saccharomyces cerevisiae
MSDINEKLPELLQDAVLKASVPIPDDFVKVQGIDYSKPEATNMRATDLIEAMKTMGFQASSVGTACEIIDSMRSWRGKHIDELDDHEKKGCFDEEGYQKTTIFMGYTSNLISSGVRETLRYLVQHKMVDAVVTSAGGVEEDLIKCLAPTYLGEFALKGKSLRDQGMNRIGNLLVPNDNYCKFEEWIVPILDKMLEEQDEYVKKHGADCLEANQDVDSPIWTPSKMIDRFGKEINDESSVLYWAHKNKIPIFCPSLTDGSIGDMLFFHTFKASPKQLRVDIVGDIRKINSMSMAAYRAGMIILGGGLIKHHIANACLMRNGADYAVYINTGQEYDGSDAGARPDEAVSWGKIKAEAKSVKLFADVTTVLPLIVAATFASGKPIKKVKN

SEQ ID NO: 453 - protein, 297 aa, Saccharomyces cerevisiae
MAFQKDAKSSAYSSRFQTPFRRRREGKTDYYQRKRLVTQHKAKYNTPKYRLVVRFTNKDIICQIISSTITGDVVLAAAYSHELPRYGITHGLTNWAAAYATGLLIARRTLQRLGLDETYKGVEEVEGEYELTEAVEDGPRPFKVFLDIGLQRTTTGARVFGALKGASDGGLYVPHSENRFPGWDFETEEIDPELLRSYIFGGHVSQYMEELADDDEERFSELFKGYLADDIDADSLEDIYTSAHEAIRADPAFKPTEKKFTKEQYAAESKKYRQTKLSKEERAARVAAKIAALAGQQ

SEQ ID NO: 454 - protein, 466 aa, Saccharomyces cerevisiae
MSSTQVGNALSSSTTTLVDLSNSTVTQKKQYYKDGETLHNLLLELKNNQDLELLPHEQAHPKIFQALKARIGRINNETCDPGEENSFFICDLGEVKRLFNNWVKELPRIKPFYAVKCNPDTKVLSLLAELGVNFDCASKVEIDRVLSMNISPDRIVYANPCKVASFIRYAASKNVMKSTFDNVEELHKIKKFHPESQLLLRIATDDSTAQCRLSTKYGCEMENVDVLLKAIKELGLNLAGVSFHVGSGASDFTSLYKAVRDARTVFDKAANEYGLPPLKILDVGGGFQFESFKESTAVLRLALEEFFPVGCGVDIIAEPGRYFVATAFTLASHVIAKRKLSENEAMIYTNDGVYGNMNCILFDHQEPHPRTLYHNLEFHYDDFESTTAVLDSINKTRSEYPYKVSIWGPTCDGLDCIAKEYYMKHDVIVGDWFYFPALGAYTSSAATQFNGFEQTADIVYIDSELD

SEQ ID NO: 455 - protein, 799 aa, Oryza sativa
MSSMESLAQLELLCEKLYNSRDSAERAHAESTLKCFSENSDYISQCQYILDNASTPYALMLASSSLLNQVNDRSLSLQLRLDILNYVINYLAMRGPKLQTFVIKSLIQLVCRITKFGWFDDDKFRDIVKEAADFLSLASQDHYFIGLKILYHLVGEMNQANAMPLTLHRKIACSFKDQFLLQIFQISLTSLHQLKSEVPDDFRRDPLSLALRCLSFDFVGCPVDESSEEFGTVQLPASWRPLLQDPSTVQIFFDYYKVNDTCVSKEKECLFKAKYFLQERSRLPAPGDANELSVIEGQLTWLVHIIEAILKIRQTIGCSQESQELIDAELAARVLQLINVTDTGVHAQRYRVLSKQRLGRAILIFVQNFRRSYVGDQAMHSSKQLYARLSELLGLNDHLVLLNAIVGKIATNLKCYAENVAISGPVQIVAVNLEATADAAFWTDVVKYAFIGLMRDLRGIAMATNRTYGLLFDWLYPSRMPLLLKAISLCADEPEVTTPLLKFMCEFVLNKAQRLTFDSSSPNGILLFQEVSKLIVAYGSRILLLPNGTDIYGSKYKGIWISLAVLSRALCGNYVNFGVFELYGDRALADALDISLKMSLSVPLSDILAFKKLSKAFYGYIEVLFSSHITFVLNLDTNTFVHIVSTLESGLKGLDTGISTQCASAIDSLAAFYFNNITAADGPPSPAALNLARHIGEFPTLFPQILKTLFEIIIFEDAGNQWSLSRPILSLIMISEQMFSNLRAQILASQPVDQQQRLSQCFEKLMSDVARNLEPKNRDKFTKNLTTFRHDFRVKNIQA

SEQ ID NO: 456 - protein, 396 aa, Saccharomyces cerevisiae
MTVTIKELTNHNYIDHELSATLDSTDAFEGPEKLLEIWFFPHKKSITTEKTLRNIGMDRWIEILKLVKCEVLSMKKTKELDAFLLSESSLFVFDHKLTMKTCGTTTTLFCLEKLFQIVEQELSWAFRTTQGGKYKPFKVFYSRRCFLFPCKQAAIHQNWADEVDYLNKFFDNGKSYSVGRNDKSNHWNLYVTETDRSTPKGKEYIEDDDETFEVLMTELDPECASKFVCGPEASTTALVEPNEDKGHNLGYQMTKNTRLDEIYVNSAQDSDLSFHHDAFAFTPCGYSSNMILAEKYYYTLHVTPEKGWSYASFESNIPVFDISQGKQDNLDVLLHILNVFQPREFSMTFFTKNYQNQSFQKLLSINESLPDYIKLDKIVYDLDDYHLFYMKLQKKI

SEQ ID NO: 457 - protein, 366 aa, Zea mays
MAVLSAAGAPPASAIGFEGYEKRLEITFSEAPVFVDPHGSGLRALSRSQIDSVLDLARKIVIKTCGTTKLLLTIPRILELAEELSMPLAAVKYSRGTFIFPGAQPAPHRSFSEEVAVLNRYFGGLKSGGNAYVIGDAARPGQKWHIYYATEYPEQPMVNLEMCMTGLDTKKASVFFKTNADGNTTCAKEMTKLSGISEIIPEMEICDFDFEPCGYSMNAIHGSAFSTIHVTPEDGFSYASYEVMGLDATALSYGDLVKRVLGCFGPSEFSVAVTIFGGRGQAGTWGKELGAEAYDCNNMVEQELPGGGILIYQSFCAAEDAVASSPKSVLRCFDGENAAPFAKDCKLANLVCLEEVGCYRGEGWSA

SEQ ID NO: 458 - protein, 400 aa, Zea mays
MAVLSAADASPVSAIGFEGYEKRLEITFSEAPVFVDPHGRGLRALSRAQIDSVLDLARCTIVSELSNKDFDSYVLSESSLFIYPLKIVIKTCGTTKLLLTIPRILELAEELSMPLAAVKYSRGTFIFPGAQPAPHRSFSEEVAALNRYFGGLKSGGNAYVIGDPARPGQKWHVFYATEYPEQPMVNLEMCMTGLDKKKACVFFKTNADGNTTCAKEMTKLSGISEIIPEMEICDFDFEPCGYSMNAIHGSAFSTIHVTPEDGFSYASYEVMGLDATALSYGDLVKRVLRCFGPSEFSVAVTIFGGRGHAGTWGKALGAEVYDCNNMVEQELPGGGLLVYQSFCAAEDAVATSPKSVFHCFDGENVESAPPPMKKDYKLANLLCWEEEADAMEEKAGVLDE

SEQ ID NO: 459 - protein, 368 aa, Glycine max
MGEAKGKEEEVLASVHSTVFKESESLDGKCVKIEGYDFNRGVNYPLLLSSMVTTGFQASNLGDAIQVVNQMLDWRLVDEPVAEDCSDQERDLEYRKSVTCKVFLGFTSNLISSGVRDTVRFLLQHRMVDVVVTTTGGIEEDLIKCLAPTYKGDFSLPGAYLRSKGLNRIGNLLVPNDNYCKFEDWIIPIFDQMLGEQNNENVLWTPSKLIARLGKEIKNESSYLYWAYKNNIPVFCPGLTDGSLGDMLYFHSFRNPGLIVDIVQDIRAMNGEAVHASPRKTGMIILGGGLPKHHICNANMMRNGADYAVFINTAQEYDGSDSGARPDEAVSWGKIRDSAQTVKVHCDATIAFPLLVAETFASKVKPPH

SEQ ID NO: 460 - protein, 370 aa, Zea mays
MAAGAGGGELEALEGVRSIVLKPSESLDESRFTRIAGADFNDPAIGLQGLLASLASTGFQASNLGDAIDVVNQMLDWRLSHEKPSEDCDEAELDPKYRASVKCKIFLGFTSNLVSSGIRDIIRFLAQHHMVDVIVTSAGGIEEDLIKCLAPTYRGDFSLPGALLRSKGLNRIGNLLVPNDNYCKFENWIMPLFDQMLQEQSTENVWTPSKVIARLGKEINDESSYLYWAYKNNIPVYCPALTDGSLGDMLFCHAVRNPGLIIDIVQDIRLMNGEAIHATPRKTGIIVLGGGLPKHHICNANMFRNGADYAVYINTAQEFDGSDSGAHPDEAVSWGKIKGSAKPVKVHCDASIAFPLLVAATFARKVHNSK

SEQ ID NO: 461 - protein, 160 aa, Zea mays
MSDSEEHHFESKADAGASKTYPQQAGTVRKNGFIVIKNRPCKVVEVSTSKTGKHGHAKCHFVAIDIFNGKKLEDIVPSSHNCDIPHVNRTEYQLIDISEDGFVSLLTSDGNTKDDLRLPTDETLVAQIKEGFESGKDLVVTVQSAMGEEQICALKDVGPK

SEQ ID NO: 462 - protein, 140 aa, Oryza sativa
MRKYRVAGLVAALLVLHSLATPSAQAEAHRAGGEGEEKMSSDGGPVLGGVEPVGNENDLHLVDLARFAVTEHNKKANSLLEFEKLVSVKQQVVAGTLYYFTIEVKEGDAKKLYEAKVWEKPWMDFKELQEFKPVDASANA

SEQ ID NO: 463 - protein, 250 aa, Oryza sativa
MRVAATTRPASSSAAAPLPLFLLLAVAAAAAALFLVGSASLAMAGHVLGGAHDAPSAANSVETDALARFAVDEHNKRENALLEFVRVVEAKEQVVAGTLHHLTLEALEAGRKKVYEAKVWVKPWLDFKELQEFRNTGDATTFTNADLGAKKGGHEPGWRDVPVHDPVVKDAADHAVKSIQQRSNSLFPYELLEIVRAKAEVVEDFVKFDILMKLKRGNKEEKFKAEVHKNLEGAFVLNQMQQEHDESSSQ

SEQ ID NO: 464 - protein, 109 aa, Sorghum bicolor
MAEAHSGRRVGMVGDVRDAPEGHENDLEAIELARFAVDEHNSKTNAMLEFERLVKVRHQVVAGTMHHFTVQVKEAGGGKKLYEAKVWEKVWENFKQLQSFQPVGDAAVA

SEQ ID NO: 465 - protein, 983 aa, Zea mays
MMESAAAQSCAACGDDARAACRACSYALCRACLDEDAAEGRTTCARCGGDYAAINPARASEGTEAEEEVVENHHTAGGLRERVTMGSHLNDRQDEVSHARTMSSLSGIGSELNDESGKPIWKNRVESWKEKKNEKKASAKKTAAKAQPPPVEEQIMDEKDLTDAYEPLSRVIPISKNKLTPYRAVIIMRLIVLGLFFHYRITNPVNSAFGLWMTSVICEIWFGFSWILDQFPKWYPINRETYVDRLIARYGDGEESGLAPVDFFVSTVDPLKEPPLITANTVLSILAVDYPVEKISCYVSDDGSAMLTFESLAETAEYARKWVPFCKKYAIEPRAPEFYFSQKIDYLKDKIHPSFVKERRAMKRDYEEYKVRINALVAKAQKTPDEGWIMQDGTPWPGNNPRDHPGMIQVFLGETGARDFDGNELPRLVYVSREKRPGYQHHKKAGAMNALVRVSAVLTNAPYILNLDCDHYVNNSKAVREAMCFMMDPTVGRDVCYVQFPQRFDGIDRSDRYANRNVVFFDVNMKGLDGLQGPVYVGTGCCFNRQALYGYGPPSLPALPKSSICSWCCCCCPKKKVERSEREINRDSRREDLESAIFNLREIDNYDEYERSMLISQMSFEKSFGLSSVFIESTLMENGGVPESANPSTLIKEAIHVISCGYEEKTEWGKEIGWIYGSVTEDILTGFKMHCRGWRSIYCMPVRPAFKGSAPINLSDRLHQVLRWALGSVEIFFSRHCPLWYGYGGGRLKWLQRLSYINTIVYPFTSLPLVAYCCLPAICLLTGKFIIPTLSNAATIWFLGLFMSIIVTSVLELRWSGIGIEDWWRNEQFWVIGGVSAHLFAVFQGILKMIAGLDTNFTVTAKATDDTEFGELYLFKWTTVLIPPTSILVLNLVGVVAGFSAALNSGYESWGPLFGKVFFAMWVIMHLYPFLKGLMGRQNRTPTIVVLWSVLLASVFSLLWVKIDPFVGGTETVNTNNCNTIIC

SEQ ID NO: 466 - protein, 453 aa, Glycine max
MATWVLSECSLKPLAPVIPRPRTGAVLSSTSKVGFLETNKVLEGSKFQPLRCNLRERNWGLKVSVPLRIASIEEEEQKSVDVINGSNGVEHEKLPEFDPGAPPPFNLADIRAAIPKHCWVKDPLKSMSYVVRDVIAVFGLASAAAYLNNWLVWPLYWAAQGTMFWALFVLGHDCGHGSFSNNPKLNSVVGHLLHSSILVPYHGWRISHRTHHQHHGHVENDESWHPLPEKLFRSLDTVTRMLRFTAPFPLLAYPVYLWGRSPGKTGSHFDPSSDLFVPNERKDVITSTACWAAMLGLLVGLGFVMGPIQLLKLYGVPYVIFVMWLDLVTYLHHHGHEDKLPWYRGKEWSYLRGGLTTLDRDYGLINNIHHDIGTHVIHHLFPQIPHYHLVEATEAAKPVFGKYYREPKKSSPLPFHLIGELIKSFKTDHFVSDKGDVVYYQTDSEINGSSKSE

SEQ ID NO: 467 - protein, 446 aa, Arabidopsis thaliana
MANLVLSECGIRPLPRIYTTPRSNFLSNNNKFRPSLSSSSYKTSSSPLSFGLNSRDGFTRNWALNVSTPLTTPIFEESPLEEDNKQRFDPGAPPPFNLADIRAAIPKHCWVKNPWKSLSYVVRDVAIVFALAAGAAYLNNWIVWPLYWLAQGTMFWALFVLGHDCGHGSFSNDPKLNSVVGHLLHSSILVPYHGWRISHRTHHQNHGHVENDESWHPMSEKIYNTLDKPTRFFRFTLPLVMLAYPFYLWARSPGKKGSHYHPDSDLFLPKERKDVLTSTACWTAMAALLVCLNFTIGPIQMLKLYGIPYWINVMWLDFVTYLHHHGHEDKLPWYRGKEWSYLRGGLTTLDRDYGLINNIHHDIGTHVIHHLFPQIPHYHLVEATEAAKPVLGKYYREPDKSGPLPLHLLEILAKSIKEDHYVSDEGEVVYYKADPNLYGEVKVRAD

SEQ ID NO: 468 - protein, 435 aa, Arabidopsis thaliana
MASSVLSECGFRPLPRFYPKHTTSFASNPKPTFKFNPPLKPPSSLLNSRYGFYSKTRNWALNVATPLTTLQSPSEEDTERFDPGAPPPFNLADIRAAIPKHCWVKNPWMSMSYVVRDVAIVFGLAAVAAYFNNWLLWPLYWFAQGTMFWALFVLGHDCGHGSFSNDPRLNSVAGHLLHSSILVPYHGWRISHRTHHQNHGHVENDESWHPLPESIYKNLEKTTQMFRFTLPFPMLAYPFYLWNRSPGKQGSHYHPDSDLFLPKEKKDVLTSTACWTAMAALLVCLNFVMGPIQMLKLYGIPYWIFVMWLDFVTYLHHHGHEDKLPWYRGKEWSYLRGGLTTLDRDYGWINNIHHDIGTHVIHHLFPQIPHYHLVEATEAAKPVLGKYYREPKNSGPLPLHLLGSLIKSMKQDHFVSDTGDVVYYEADPKLNGQRT

SEQ ID NO: 469 - protein, 359 aa, Synechocystis PCC6803
VRLEISSPQTKLPYPKTEELPFTLQELRNAIPADCFEPSVVRSLGYFFLDVGLIAGFYALAAYLDSWFFYPIFWLIQGTLFWSLFVVGHDCGHGSFSKSKTLNNWIGHLSHTPILVPYHGWRISHRTHHANTGNIDTDESWYPVSEQKYNQMAWYEKLLRFYLPLIAYPIYLFRRSPNRQGSHFMPGSPLFRPGEKAAVLTSTFALAAFVGFLGFLTWQFGWLFLLKFYVAPYLVFVVWLDLVTFLHHTEDNIPWYRGDDWYFLKGALSTIDRDYGFINPIHHDIGTHVAHHIFSNMPHYKLRRATEAIKPILGEYYRYSDEPIWQAFFKSYWACHFVPNQGSGVYYQSPSNGGYQKKP

SEQ ID NO: 470 - protein, 252 aa, Zea mays
MMLRVSASPAAAVANHLSGGAAATTAPARVTAQRSGVSLSAAAAAGKGKEVLSGVVFQPFEEIKGELALVPQSPDRSLARHKFVDDCEAAINEQINVEYNASYAYHSLFAYFDRDNVALKGFAKFFKESSDEEREHAEKLMEYQNKRGGRVRLQSIVAPLTEFDHPEKGDALYAMELTLALEKLVNEKLHSLHGVATRCNDPQLIDFIESEFLEEQVEAINKVSKYVAQLRRVGNKGHGVWHFDQMLLQEGA

SEQ ID NO: 471 - protein, 254 aa, Zea mays
MMLRVSPSPAAAVPTQLSGAPATPAPVVRVAAPRGVASPSAGAACRAAGKGKEVLSGVVFQPFEEIKGELALVPQSPDKSLARHKFVDDCEAALNEQINVEYNASYAYHSLFAYFDRDNVALKGFAKFFKESSDEEREHAEKLMEYQNKRGGRVRLQSIVTPLTEFDHPEKGDALYAMELALALEKLVNEKLHNLHGVATRCNDPQLTDFIESEFLEEQVEAINKISKYVAQLRRVGKGHGVWHFDQMLLEEEA

SEQ ID NO: 472 - protein, 165 aa, Escherichia coli
MLKPEMIEKLNEQMNLELYSSLLYQQMSAWCSYHTFEGAAAFLRRHAQEEMTHMQRLFDYLTDTGNLPRINTVESPFAEYSSLDELFQETYKHEQLITQKINELAHAAMTNQDYPTFNFLQWYVSEQHEEEKLFKSIIDKLSLAGKSGEGLYFIDKELSTLDTQN

SEQ ID NO: 473 - protein, 347 aa, Aspergillus nidulans
MPSTTSRAAFEAVFPSLAEAMLDHARKYNLPQNAQEWFSKAIHTNVPGGKLNRGLSVPDTGVALLQKELSEEQYKDLATLGWLTELLQAFFLVSDDLMDGSITRRGQPCWYRHQGVGLIAINDAFLLESGIYVILKKQFRSHPAYVDFIELFHETTWQTELGQLCDLITAPEDKVDLNNFSMEKYMFIVTYKTAYYSFYLPVALALHYLQLATPENLRQAHDILIPLGQYFQVQDDYLDAYGDPEVIGKIGTDIQDNKCSWLVNQALQRCSAEQRKVLDAAYGRKDAEQEAKVKAIFRELDLESVYKEYEEKIVGELKTKIAAVNESEGLKKEVFEAFLGKIYKRSK

SEQ ID NO: 474 - protein, 353 aa, Oryza sativa
MAAAVVANGASGDSSKAAFAEIYSRLKEEMLEDPAFEFTDESLQWIDRMLDYNVLGGKCNRGISVIDSFKMLKGTDVLNKEETFLACTLGWCIEWLQAYFLVLDDIMDNSQTRRGQPCWFRVPQVGLIAVNDGIILRNHISRILQRHFKGKLYYVDLIDLFNEVEFKTASGQLLDLITTHEGEKDLTKYNLTVHRRIVQYKTAYYSFYLPVACALLLSGENLDNFGDVKNILVEMGTYFQVQDDYLDCYGDPEFIGKIGTDIEDYKCSWLVVQALERADENQKHILFENYGKPDPECVAKVKDLYKELNLEAVFHEYERESYNKLIADIEAHPNKAVQNVLKSFLHKIYKRQK

SEQ ID NO: 475 - protein, 355 aa, Zea mays
MATAEVVVANGSGGADTKTAFKEIYSKLKQEMLEDPAFEFTDESLQWIDRMLDYNVLGGKCNRGLSVVDSYKILKGVDVLSKEETFLACTLGWCIEWLQAYFLVLDDIMDNSQTRRGQPCWFRVPQVGLIAVNDGIILRNHISRILQRHFKGKPYYVDIIDLFNEVEFKTASGQMLDLITTHEGEKDLTKYNLTVHRRIVQYKTAYYSFYLPVACALLLAGENLENFVDVKNILVEMGTYFQVQDDYLDCFGDPEFIGKIGTDIEDYKCSWLVVQALERAAENQKSILFENYGKSDPACVAKVKDLYKELKLEEVFHEYERESYNKLIADIEAQPSKAVQTVLKSFLHKIYKRDK

SEQ ID NO: 476 - protein, 271 aa, Triticum sp.
MLLLNPASEAAAAALDSIRQQLLEEPMAPARPAYCRSASFGSLVADQWSESLPFRPNDADDMVVYGALRDAFSCGWLPDGSFAAVKPEPLPSPDSYDGCCLGSFLASPPGLDAPWAEEAEVAATASRGKHFRGVRQRPWGKFAAEIRDPAKNGARVWLGTFDSAEDAAVAYDRAAYRMRGSRALLNFPLRIGSEIAAAAGQKRPSPQPASPDSPPPSSSAPGSSKRRKRGEAAAESMSMALVPPPPVQAPVQLTLPVQPWLATGAVQQLVS

SEQ ID NO: 477 - protein, 585 aa, Saccharomyces cerevisiae
MLHRHGSKQKNFENIAGKVVHDLAGLQLLSNDVQKSAVQSGHQGSNNMRDTSSQGMANKYSVPKKGLPADLSYQLIHNELTLDGNPHLNLASFVNTFTTDQARKLIDENLTKNLADNDEYPQLIELTQRCISMLAQLWHANPDEEPIGCATTGSSEAIMLGGLAMKKRWEHRMKNAGKDASKPNIIMSSACQVALEKFTRYFEVECRLVPVSHRSHHMLDPESLWDYVDENTIGCFVILGTTYTGHLENVEKVADVLSQIEAKHPDWSNTDIPIHADGASGGFIIPFGFEKEHMKAYGMERWGFNHPRVVSMNTSGHKFGLTTPGLGWVLWRDESLLADELRFKLKYLGGVEETFGLNFSRPGFQVVHQYFNFVSLGHSGYRTQFQNSLFVARAFSFELLNSSKLPGCFEIVSSIHESIENDSAPKSVKDYWEHPQAYKPGVPLVAFKLSKKFHEEYPEVPQAILSSLLRGRGWIIPNYPLPKATDGSDEKEVLRVVFRSEMKLDLAQLLIVDIESILTKLIHSYEKVCHHIELASEQTPERKSSFIYEMLLALASPQDDIPTPDEIEKKNKLKETTTRNYRGTC

SEQ ID NO: 478 - protein, 332 aa, Oryza sativa
MSSRMAGSAILRHVGGVRLFTASATSPAAAAAAAARPFLAGGEAVPGVWGLRLMSTSSVASTEAAAKAEAKKADAEKEVVVNSYWGIEQSKKLVREDGTEWKWSCFRPWETYTADTSIDLTKHHVPKTLLDKIAYWTVKSLRFPTDIFFQRRYGCRAMMLETVAAVPGMVGGMLLHLRSLRRFEQSGGWIRTLLEEAENERMHLMTFMEVANPKWYERALVITVQGVFFNAYFLGYLLSPKFAHRVVGYLEEEAIHSYTEFLKDLEAGKIDNVPAPAIAIDYWRLPANATLKDVVTVVRADEAHHRDVNHFASDIHYQGMELKQTPAPIGYH

SEQ ID NO: 479 - protein, 351 aa, Aspergillus nidulans
MSTTGPIRVAAIPKHYLQFTVRTYTRSMASAGLRYSNPPLVKKCYDQPTGKRFISSTPQSQIKDYFPPPDAPKIVEVKTAWAHPVYSEEEMRAVTVGHREAKNWSDWVALGSVRLLRWGMDLVTGYKHPAPGQEDIKKFQMTEKEWLRRFVFLESVAGVPGMVGGMLRHLRSLRRMKRDNGWIETLLEEAYNERMHLLTFLKMAEPGWFMRLMVLGAQGVFFNGFFLSYLISPRTCHRFVGYLEEEAVLTYTRAIKDLESGRLPHWEKLEAPEIAVKYWKMPEGNRTMKDLLLYVRADEAKHREVNHTLGNLKQAVDVNPFAVEWKDPSKPHPGKGIKHLKTTGWEREEVV

SEQ ID NO: 480 - protein, 833 aa, Saccharomyces cerevisiae
MNNAANTGTTNESNVSDAPRIEPLPSLNDDDIEKILQPNDIFTTDRTDASTTSSTAIEDIINPSLDPQSAASPVPSSSFFHDSRKPSTSTHLVRRGTPLGIYQTNLYGHNSRENTNPNSTLLSSKLLAHPPVPYGQNPDLLQHAVYRAQPSSGTTNAQPRQTTRRYQSHKSRPAFVNKLWSMLNDDSNTKLIQWAEDGKSFIVTNREEFVHQILPKYFKHSNFASFVRQLNMYGWHKVQDVKSGSIQSSSDDKWQFENENFIRGREDLLEKIIRQKGSSNNHNSPSGNGNPANGSNIPLDNAAGSNNSNNNISSSNSFFNNGHLLQGKTLRLMNEANLGDKNDVTAILGELEQIKYNQIAISKDLLRINKDNELLWQENMMARERHRTQQQALEKMFRFLTSIVPHLDPKMIMDGLGDPKVNNEKLNSANNIGLNRDNTGTIDELKSNDSFINDDRNSFTNATTNARNNMSPNNDDNSIDTASTNTTNRKKNIDENIKNNNDIINDIIFNTNLANNLSNYNFNNNAGSPIRPYKQRYLLKNRANSSTSSENPSLTPLISNLIMTAKFQKFLLMTKKKKKPDFRPFTSRDPNNQTSENTFDPNRFTMLSDDDLKKDSHTNDNKHNESDLFWDNVHRNIDEQDARLQNLENMVHILSPGYPNKSFNNKTSSTNTNSNMESAVNVNSPGFNLQDYLTGESNSPNSVHSVPSNGSGSTPLPMPNDNDTEHASTSVNQGENGSGLTPFLTVDDHTLNDNNTSEGSTRVSPDIKFSATENTKVSDNLPSFNDHSYSTQADTAPENAKKRFVEEIPEPAIVEIQDPTEYNDHRLPKRVKK

SEQ ID NO: 481 - protein, 912 aa, Zea mays
MNPDNFTHKTNEAIVGAHEIAVEAGHAQLTPLHLAAVLAADKGGILRQAITGASGGDGAAGDSFERVLNNSLKKLPSQSPPPDSVPASTALIKVIRRAQSAQKKRGDSHLAVDQLLLGLLEDSQISDCLKEAGVSAARVRAELEKLRGGEGRRVESASGDTNFQALKTYGRDLVEQAGKLDPVIGRDEEIRRVVRILSRRTKNNPVLIGEPGVGKTAVVEGLAQRIVRGDVPSNLLDVRLIALDMGALVAGAKYRGEFEERLKAVLKEVEEAEGKVILFIDEIHLVLGAGRTEGSMDAANLFKPMLARGQLRCIGATTLEEYRKYVEKDAAFERRFQQVFVAEPSVPDTVSILRGLKEKYEGHHGVRIQDRALVVAAQLSARYIMGRHLPDKAIDLVDEACANVRVQLDSQPEEIDNLERKRIQLEVELHALEKEKDKASKARLIEVRKELDDLRDKLQPLTMKYRKEKERIDEIRKLKQRREELQFTLQEAERRMDLARVADLKYGALQEIDAAISKLESETGENLMLTETVGPEQIAEVVSRWTGIPVTRLGQNDKERLVGLADRLHQRVVGQTEAVSAVAEAVLRSRAGLGRPQQPTGSFLFLGPTGVGKTELAKALAEQLFDDENLLVRIDMSEYMEQHSVARLIGAPPGYVGHEEGGQLTEQVRRRPYSVILFDEVEKAHVAVFNTLLQVLDDGRLTDGQGRTVDFRNTVIIMTSNLGAEHLLAGMVGKNSMKVARDLVMQEVRRHFRPELLNRLDEIVIFDPLSHEQLRKVARLQMKDVAVRLAERGIALAVTDAALDIILSLSYDPVYGARPIRRWIEKRVVTQLSKMLIQEEIDENCTVYIDAAPGKDELVYRVDRSGGLVNAETGMKSDILIQVPNSSTRSDAAQAVKKMRIMEEDEDGMDEE

SEQ ID NO: 482 - protein, 908 aa, Saccharomyces cerevisiae
MNDQTQFTERALTILTLAQKLASDHQHPQLQPIHILAAFIETPEDGSVPYLQNLIEKGRYDYDLFKKVVNRNLVRIPQQQPAPAEITPSYALGKVLQDAAKIQKQQKDSFIAQDHILFALFNDSSIQQIFKEAQVDIEAIKQQALELRGNTRIDSRGADTNTPLEYLSKYAIDMTEQARQGKLDPVIGREEEIRSTIRVLARRIKSNPCLIGEPGIGKTAIIEGVAQRIIDDDVPTILQGAKLFSLDLAALTAGAKYKGDFEERFKGVLKEIEESKTLIVLFIDEIHMLMGNGKDDAANILKPALSRGQLKVIGATTNNEYRSIVEKDGAFERRFQKIEVAEPSVRQTVAILRGLQPKYEIHHGVRILDSALVTAAQLAKRYLPYRRLPDSALDLVDISCAGVAVARDSKPEELDSKERQLQLIQVEIKALERDEDADSTTKDRLKLARQKEASLQEELEPLRQRYNEEKHGHEELTQAKKKLDELENKALDAERRYDTATAADLRYFAIPDIKKQIEKLEDQVAEEERRAGANSMIQNVVDSDTISETAARLTGIPVKKLSESENEKLIHMERDLSSEVVGQMDAIKAVSNAVRLSRSGLANPRQPASFLFLGLSGSGKTELAKKVAGFLFNDEDMMIRVDCSELSEKYAVSKLLGTTAGYVGYDEGGFLTNQLQYKPYSVLLFDEVEKAHPDVLTVMLQMLDDGRITSGQGKTIDCSNCIVIMTSNLGAEFINSQQGSKIQESTKNLVMGAVRQHFRPEFLNRISSIVIFNKLSRKAIHKIVDIRLKEIEERFEQNDKHYKLNLTQEAKDFLAKYGYSDDMGARPLNRLIQNEILNKLALRILKNEIKDKETVNVVLKKGKSRDENVPEEAEECLEVLPNHEATIGADTLGDDDNEDSMEIDDDLD

SEQ ID NO: 483 - protein, 857 aa, Escherichia coli
MRLDRLTNKFQLALADAQSLALGHDNQFIEPLHLMSALLNQEGGSVSPLLTSAGINAGQLRTDINQALNRLPQVEGTGGDVQPSQDLVRVLNLCDNVAQKRGDNFISSELFVLAALESRGTVADILKAAGATTANITQAIEQMRGGESVNDQGAEDQRQALKKYTIDLTERAEQGKLDPVIGRDEEIRRTIQVLQRRTKNNPVLIGEPGVGKTAIVEGLAQRIINGEVPEGLKGRRVLALDMGALVAGAKYRGEFEERLKGVLNDLAKQEGNVILFIDELHTMVGAGKADGAMDAGNMLKPALARGELHCVGATTLDEYRQYIEKDAALERRFQKVFVAEPSVEDTIAILRGLKERYELHHHVQITDPAIVAAATLSHRYIADRQLPDKAIDLIDEAASSIRMQIDSKPEELDRLDRRIIQLKLEQQALMKESDEASKKRLDMLNEELSDKERQYSELEEEWKAEKASLSGTQTIKAELEQAKIAIEQARRVGDLARMSELQYGKIPELEKQLEAATQLEGKTMRLLRNKVTDAEIAEVLARWTGIPVSRMMESEREKLLRMEQELHHRVIGQNEAVDAVSNAIRRSRAGLADPNRPIGSFLFLGPTGVGKTELCKALANFMFDSDEAMVRIDMSEFMEKHSVSRLVGAPPGYVGYEEGGYLTEAVRRRPYSVILLDEVEKAHPDVFNILLQVLDDGRLTDGQGRTVDFRNTVVIMTSNLGSDLIQERFGELDYAHMKELVLGVVSHNFRPEFINRIDEVVVFHPLGEQHIASIAQIQLKRLYKRLEERGYEIHISDEALKLLSENGYDPVYGARPLKRAIQQQIENPLAQQILSGELVPGKVIRLEVNEDRIVAVQ

SEQ ID NO: 484 - protein, 872 aa, Synechocystis PCC6803
MQPTDPNKFTEKAWEAIAKTPEIAKQHRQQQIETEHLLSALLEQNGLATSIFNKAGASIPRVNDQVNSFIAQQPKLSNPSESIYLGRSLDKLLDNAEIAKSKYGDDYISIEHLMAAYGQDDRLGKNLYREIGLTENKLAEIIKQIRGTQKVTDQNPEGKYESLEKYGRDLTELAREGKLDPVIGRDEEVRRTIQILSRRTKNNPVLIGEPGVGKTAIAEGLAQRIINHDVPESLRDRKLISLDMGALIAGAKYRGEFEERLKAVLKEVTDSQGQIILFIDEIHTVVGAGATQGAMDAGNLLKPMLARGALRCIGATTLDEYRKYIEKDAALERRFQEVLVDEPNVLDTISILRGLKERYEVHHGVKIADSALVAAAMLSNRYISDRFLPDKAIDLVDEAAAKLKMEITSKPEELDEVDRKILQLEMERLSLQRENDSASKERLEKLEKELADFKEEQSKLNGQWQSEKTVIDQIRTVKETIDQVNLEIQQAQRDYDYNKAAELQYGKLTDLQRQVEALETQLAEQQTSGKSLLREEVLESDIAEIISKWTGIPISKLVESEKEKLLHLEDELHSRVIGQDEAVTAVAEAIQRSRAGLSDPNRPTASFIFLGPTGVGKTELAKALAKNLFDTEEALVRIDMSEYMEKHAVSRLMGAPPGYVGYEEGGQLTEAIRRRPYSVILFDEIEKAHGDVFNVMLQILDDGRLTDAQGHVVDFKNTIIIMTSNLGSQYILDVAGDDSRYEEMRSRVMDVMRENFRPEFLNRVDETIIFHGLQKSELRSIVQIQIQSLATRLEEQKLTLKLTDKALDFLAAVGYDPVYGARPLKRAVQKYLETAIAKGILRGDYKPGETIVVDETDERLSFTSLRGDLVIV

SEQ ID NO: 485 - protein, 861 aa, Xylella fastidiosa
MRMDKLTSRFQNALADAQSLAVGRDHTIIEPVHVFSALLDQQGGSTRPLLMQAGVNVPLLRERLTEILEALPKVSGQTVNVSPSNELSRLFHRTDKLAQQHGDQFMASEWFVLAVVDDSGGLGQALRAAGAEKKKIEAAIDKLRGGETVQTENAEEQRQALEKYTIDLTARAESGKLDPVIGRDEEIRRTIQVLQRRTKNNPVLIGEPGVGKTAIVEGLAQRIVNGEVPEGLRSKRLLSLDLGALIAGAKFRGEFEERLKGVLNDLAKNEGRVILFIDELHTMVGAGKADGAMDAGNMLKPALARGELHCIGATTLDEYRKYIEKDAALERRFQKVFVGEPTVEDTIAILRGLKEKYALHHGVEITDPAIVAAATLSNRYITDRQLPDKAIDLMDEAASRIRMEIDSKPEELDRLERRLIQLKIQREMLKKEKDEASKQRLADLERDIEVLDREFSDLEEVWRSEKAALQGATKIKESIEQAKLDLEAAQRRQDYAKMSEIQYGVLPALEKQLVAASQAEQHDFTLVQEKVTAEEIAEVVSRWTGIPVSKMLEGERDKLLRMEADLGRRVVGQEEAIKVVSDAVRRSRTGLSDPNRPSGSFLFLGPTGVGKTELCKALAEFLFDSQDAMVRIDMSEFMEKHSVARLIGAPPGYVGYEEGGYLTELVRRRPYSLILLDEVEKAHSDVFNILLQVLDDGRLTDGQGRTVDFRNTVIVMTSNLGSHQIQELSGDDSPEVYTQMKAAVMEVVQAHFRPEFINRLDDIVVFHPLDKAQIKQIARIQLQGLEKRLAESELKLDLDDRALELLGNVGFDPVYGARPLKRAIQSQLENPLAQQILAEAFVSGDTVQVGVDGGKLVFAKV

SEQ ID NO: 486 - protein, 364 aa, Glycine max
MVKSNENGSGSVSVPPFLKKCYDMVEDRNTDSIIRWSDGGDSFVISDITQFSVTLLPTYFKHNNFSSFIRQLNIYGFRKIDTDCWEFANENFVRGQKHLLKNIRRRKHPHSADQQKALPQQDNCDEPSQEAPYHGLWKEVENLKLDKNSLTQELVKLRQHQESAENKLLLLSDRLQGMEKHQQQMLSFLVMVVQSPGFMVQLLHPKENNWHLAESWNILDQDKQDDKPVASDGMIIKYKPPVGEKLKPVVPLSPGFEKQTEPELSAEGLKDLCVSSEFLKVLLDEKLSPLENHSPFLLPDLPDDGSWEQLFLGSPFMGNIQDSNKESEGHTNGGMEMEPTISETPNENSRTFESMIVEMEKTRE

SEQ ID NO: 487 - protein, 300 aa, Glycine max
MAPPLEHNGVSTSGDSQRSIPTPFLTKTYQLVDDHTIDDVISWNDSGSSFIVWNTTAFAKDLLPKYFKHNNFSSFVRQLNTYGFRKVVPDRWEFSNEYFRRGEKRLLCEIQRRKILSASPPPAGATATVAVPSPLPLSAIPTAKPIVSPSNSAEEQVLSSNSSPARAPVELLDENERLRKENILLTKELVKMRSLCNNIFNLMSNYANAQADGSSAAAAKRCSGEDAVEEMNPKLFGVAIGKKRAREEEGHGAKYDTALSLHQPFHADVKSEALDLPGRGENKKTPWLNQCHRANQRVCN

SEQ ID NO: 488 - protein, 380 aa, Zea mays
MASVAELKEKHAAATASVNSLRERLRQRRETLLDTDVARYSKSQGRVPVSFNPTDLVCCRTLQGHSGKVYSLDWTPEKNWIVSASQDGRLIVWNALTSQKTHAIKLHCPWVMACAFAPNGQSVACGGLDSACSIFNLNSQADRDGNMPVSRILTGHKGYVSSCQYVPDQETRLITSSGDQTCVLWDVTTGQRISIFGGEFPSGHTADVQSVSINSSNTNMFVSGSCDTTVRLWDIRIASRAVRTYHGHEDDVNSVKFFPDGHRFGTGSDDGTCRLFDMRTGHQLQVYSREPDRNSNELPTVTSIAFSISGRLLFAGYSNGDCYVWDTLLAEVVLNLGNLQNSHDGRISCLGMSSDGSALCTGSWDKNLKIWAFSGHRKIV

SEQ ID NO: 489 - protein, 506 aa, Glycine max
MSGGGEEGATLEFTPTWVVAAFCTVIVAISLAAERLLHYGGKFLKAKDQKPLYEALQKIKEELMLLGFISLLLTVTQNGITKICVRPSLTLHMLPCNLHDAPANHESHFQTFFPGTARRLLSGEHSTPESASKIGYCSRKHKVPLLSVEALHHLHIFIFVLAVVHVSFSVLTVVFGGARIRQWKHWEDSIAKQNYETDRVLKPKVTQVHQHDFIRGRFAGFGKDSAIVGWLLSFLKQFYGSVTKSDYVTLRHGFIMTHCRTNPKFNFHKYMIRALEDDFKQVVGISWYLWLFVVIFLLLNINGWHTYFWIAFIPVILLLAVGTKLEHIITQLAHEVAEKHAAIEGDLVVQPSDDHFWFHRPRVVLFLIHFILFQNAFEIAFFFWIWVTYGFDSCIMGQVRYIVPRLVIGVFIQVLCSYSTLPLYAIVTQMGTHYKRAIFNDHLQQNIVGWAQKAKKRKGLKADGNPGQGSSQESANTGIQLGSIFKKATAPGDSSSAPKADGISSV

SEQ ID NO: 490 - protein, 598 aa, Glycine max
MYSSKFRKLFCSVLFSWLCFGGLAMAAGESSSSSRDLDQTPTWAVAAVCTVFILVSIALEKSLHKVGTWLGQKKKKALLEALEKVKAELMILGFISLLLTFGQSYIVRICIPEKLADNMLPCPYKYKEDKKASDSEEEHRRKLLSYERRYLAADTTSFKCSREGHEPLLSVNGLHQLHILVFFLAVIHVLYSAITMMLGRLKIRGWKAWEAETSTHNYEFANAASRFRLTHETSFVRAHSSFLTRIPIFFYIRCFFRQFYRSVNKTDYLTLRNGFITVHLAPGSKFNFQKYIKRSLEDDFKVVVGVSPILWASVVVYLLINVNGWHTVLWAALIPVVIILAVGTKLQAILANMALEITERHAVVQGMPLVQGSDKYFWFGQPQLVLHLIHFALFQNAFQITYILWIWYSFGLRNCFRTDYKLAVVKVALGILMLCLCSYITLPLYALVTQMGSRMKTAIFDEQTNKALKKWHMAAKKKQGGAVTLGKSSARIMDGSPIGNSSTVHSTGPTLHRFKTTGHSTRSSSTAYEDQDQDHEYESDGVELSPLASQTTSFIVRVDHGDQQQAEHRQDSEGETNSSSEGEFSFVKPDPVEIRTTT

SEQ ID NO: 491 - protein, 380 aa, Oryza sativa
MGSSCSRSHSLSEAETTKNAKSADIDRRILQETKAEQHIHKLLLLGAGESGKSTIFKQIKLLFQTGFDEAELRSYTSVIHANVYQTIKILYEGAKELSQVESDSSKYVISPDNQEIGEKLSDIDGRLDYPLLNKELVLDVKRLWQDPAIQETYLRGSILQLPDCAQYFMENLVRLAEAGYVPTKEDVLYARVRTNGVVQIQFSPVGENKRGGEVYRLYDVGGQRNERRKWIHLFEGVNAVIFCAAISEYDQMLFEDETKNRMMETKELFDWVLKQRCFEKTSFILFLNKFDICEKKIQKVPLSVCEWFKDYQPIAPGKQEVEHAYEFVKKKFEELYFQSSKPDRVDRVFKIYRTTALDQKLVKKTFKLIDESMRRSREGT

SEQ ID NO: 492 - protein, 109 aa, Glycine max
MASETASSADEETVVVVSAAAGAGGTDKRGKHRILAELKRLDQESKFLQEELEELEKTENVSTICTELLQNIDTRPDPLLPEVHGPVNLLWDRWFEGPQDPQACRCWIL

SEQ ID NO: 493 - protein, 1039 aa, Synechocystis PCC6803
MATIHGNWQPSHGENGGKLFLWADTWGHPLPETIGDRHPFALDLPDLLQAWSNLPLAFPKADGVTEAALTLHLPSHRQQKIPLPFVTGQDPVAMDAKYLHWRSWQVTGVNLTPSQTLTLLQSIPLGGQALANLGSEFYFYGQLHRWCLDLVLRGKFVPGLEQRGEDGNYYAQWIPILDSIQDQTHLAQFSQRVPACALANLTDSQEPQMLVVDLLQKLLQAQIGAVSPSLANVKEVWLNDWLRGLTHGGQTSLGTGKALQRLATSLDHWYLPVQNYLGQKNNQALAQRQWRGALRLQPPADDGGGTWQLDYGLQALDDGEFWLPAASLWAMAGDRLVWQGRRVDQGAESLLRGLGVAAQIYEPIAASLTERCPTGCGLDAIQAYEFILAIAHQLRDRGLGVILPPGLERGGTAKRLGVKVVGEVQRQRGQRLTLQSLINYDLQLMMGSGDNARLLTAKDFEALLAQKSPLVVLDGEWITLQPADVRAAKVILQQQQSAPPLTVEDALRLSIGDLQTVSKLPVTQFAARGILQELIDTLRNPEGVKAIADPPGFQGTLRPYQARGVGWLAFLERWGLGACLADDMGLGKTPQLLAFLLHLAAEDMLVKPVLIVCPTSVLSNWGHEINKFAPQLKTLLHHGDRRKKGQPLVKQVKDQQIVLTSYALLQRDFSSLKLVDWQGIVLDEAQNIKNPQAKQSQAARQLPAGFRIALTGTPVENRLTELWSILEFLNPGFLGNQSFFQRRFANPIEKFGDRQSLLILRNLVRPFILRRLKTDQTIIQDLPEKQEMTVFCDLSQEQAGLYQQLVEESLQAIADSEGIQRHGLVLTLLTKLKQVCNHPDLLLKKPAITHGHQSGKLIRLAEMLEEIISEGDRVLIFTQFASWGHLLKPYLEKYFNQEVLYLHGGTPAEQRQALVERFQQDPNSPYLFILSLKAGGTGLNLTRANHVFHVDRWWNPAVENQATDRAFRIGQTRNVQVHKFVCTGTLEEKINAMMADKQQLAEQTVDAGENWLTRLDTDKLRQLLTLSATPVDYQAEASD

SEQ ID NO: 494 - protein, 181 aa, coliphage T4
MTIEKEIEGLIHKTNKDLLNENANKDSRVFPTQRDLMAGIVSKHIAKNMVPSFIMKAHESGIIHVHDIDYSPALPFTNCCLVDLKGMLENGFKLGNAQIETPKSIGVATAIMAQITAQVASHQYGGTTFANVDKVLSPYVKRTYAKHIEDAEKWQIADALNYAQSKTEKDVYDAFQAYELT

SEQ ID NO: 495 - protein, 201 aa, Zea mays
MSRHPEVKWAQRIDKVYITVQLPDAKDAKVNLEPDGVFTFSGSVGTNLYELKLDLNDKVNVEASKISVGVRSIFCIVEKAEAKWWKKLVRDDQRAPHFVKVDWDKWVDEDDDGADVNLDGMDFSNFGGMGGMGGMGGMGDMAGLGGLGGMGGMGGMGGMGMDDFEDDSDEEEVSKPQAAGHAAEAEKTESAEAKTESAQSS

SEQ ID NO: 496 - protein, 553 aa, Zea mays
MDEDFEMPPAGADEMMGDDEMGDFGGDEGPVMKVGEEKEVGKEGLKKKLLKEGEGWETPEVGDEVEVHYTGTLLDGTKFDSSRDRGEPFKFKLGQGQVIKGWDQGIKTMKKGENAIFTIPPELAYGASGSPPTIPPNATLQFDVELLSWTSVKDICKDGGIFKKILKEGEKWENPKDPDEVLVKYEARLEDGTVVSKSEGVEFTVKDGYFCPALAKAVKTMKKAEKVLLTVKPQYGFGEKGRPAAGEEGAVPPNASLLIDLELISWKTVTEIGDDKKILKKVLKEGEGYERPNEGAVVEVKIIGKLQDGAVFTKKGHDEEPFKFKTDEEEVIAGLDRAVLNMKKGEVALVTIPPEYAFGSTESKQDLAVVPPNSTVIYEVELISFVKDKESWDLNNEEKIEAAGKKKEEGNALFKSGKYARASKRYEKAAKYIEYDTSFSEDEKKQSKQLKISCNLNNAACKLKLKDYKEAAKLCTKVLELDSQNVKALYRRVQAYIQLADLELAEADIKKALEIDPDNRDVKLEYKILKEKIKEYNKKDAKFYSNMFAKMTK

SEQ ID NO: 497 - protein, 709 aa, Saccharomyces cerevisiae [sequence omitted]

SEQ ID NO: 498 - protein, 589 aa, Saccharomyces cerevisiae
MSLTADEYKQQGNAAFTAKDYDKAIELFTKAIEVSETPNHVLYSNRSACYTSLKKFSDALNDANECVKINPSWSKGYNRLGAAHLGLGDLDEAESNYKKALELDASNKAAKEGLDQVHRTQQARQAQPDLGLTQLFADPNLIENLKKNPKTSEMMKDPQLVAKLIGYKQNPQAIGQDLFTDPRLMTIMATLMGVDLNMDDINQSNSMPKEPETSKSTEQKKDAEPQSDSTTSKENSSKAPQKEESKESEPMEVDEDDSKIEADKEKAEGNKFYKARQFDEAIEHYNKAWELHKDITYLNNRAAAEYEKGEYETAISTLNDAVEQGREMRADYKVISKSFARIGNAYHKLGDLKKTIEYYQKSLTEHRTADILTKLRNAEKELKKAEAEAYVNPEKAEEARLEGKEYFTKSDWPNAVKAYTEMIKRAPEDARGYSNRAAALAKLMSFPEAIADCNKAIEKDPNFVRAYIRKATAQIAVKEYASALETLDAARTKDAEVNNGSSAREIDQLYYKASQQRFQPGTSNETPEETYQRAMKDPEVAAIMQDPVMQSILQQAQQNPAALQEHMKNPEVFKKIQTLIAAGIIRTGR

SEQ ID NO: 499 - protein, 385 aa, Saccharomyces cerevisiae
MSSVNANGGYTKPQKYVPGPGDPELPPQLSEFKDKTSDEILKEMNRMPFFMTKLDETDGAGGENVELEALKALAYEGEPHEIAENFKKQGNELYKAKRFKDARELYSKGLAVECEDKSINESLYANRAACELELKNYRRCIEDCSKALTINPKNVKCYYRTSKAFFQLNKLEEAKSAATFANQRIDPENKSILNMLSVIDRKEQELKAKEEKQQREAQERENKKIMLESAMTLRNITNIKTHSPVELLNEGKIRLEDPMDFESQLIYPALIMYPTQDEFDFVGEVSELTTVQELVDLVLEGPQERFKKEGKENFTPKKVLVFMETKAGGLIKAGKKLTFHDILKKESPDVPLFDNALKIYIVPKVESEGWISKWDKQKALERRSV

SEQ ID NO: 500 - protein, 153 aa, Saccharomyces cerevisiae
MVVLNPNNWHWVDKNTLPWSKDYLNGKLTSLSTVSSDGKSKIELTQVSSITGDSNVSQRKGKPICYFDLQLSMNVKVTNLDTNKDDEDDDGILADGKLEIPEFMHDESDIPILSQGFDAFDGLVRSEFVPKVVETLLKYQDDLIKEHSKDIQV

SEQ ID NO: 501 - protein, 213 aa, Oryza sativa
MSRHPEVKWAQRIDKVYITVQLADAKDAKVNLEPEGVFSFSATAGTDGNLYESKLELNDKVNVEESKISVGVRSIFCIVEKAEAKWWKKLVRDDQKAPHFVKVDWDKWVDEDDDGADVNVDGMDFSNFGGMGGMGGMGGMGDMMGGMGGMGGMGGMAEMMGGMGGMGGMGGMGGMDEFEDESDDEEEVSKPQDAEKAAEAGKSQESDAKAETS

SEQ ID NO: 502 - protein, 165 aa, Zea mays
MSSSGPLLATGTHHTGRQPEVLWAQRSEKIFLTISLPDAKDVVLKTDPKGLFNFSAVVHGEPFSFTLELFDSILSEGSKTKTKMGLRNIICSIQKEKKGWWKRLLKSEEKHPYIKVDWNKWCDEDEESEFSGDSDGGFDEANEGDESDDDDGMLYLPDLEKLRGK

SEQ ID NO: 503 - protein, 173 aa, Oryza sativa
MSRHPSTKWAQRSDKVFLTIELPDARDVKLNLKPEGQFIFSAKGPADDTPYELDLELFDAVNVEESKAAVAARSICYLIKKAESKWWPRLLKKEGKPPVFLKVDWDKWQDEDDEDIGLGDFGDMDFSKLGMGGPDDDLEDDDEDDTADSANKDDEDIKAEGSGEQEAAGEAKP

SEQ ID NO: 504 - protein, 176 aa, Zea mays
MSRHPITKWAQRSDRVFLTIELPDAQDVKLNLKPEGHFNFSAKGSDDLRYEFDIELFDAVNVEESKAAIAPRTICYLIKKAKSGWWPRLLKQEGKPPVFLKVDWDKWQDEDDEDAGFNDFGGMDFSKLDIGGADDDDIGDDEDDVVESANKDEEGGKTEESKEEEAAPAAAEEVKP

SEQ ID NO: 505 - protein, 374 aa, Oryza sativa
MALLMDPGAGGPLTESEKADLDAIAAIKESAAAEYKEKGNRLVKMGRSHYADAVDCYTKAIAQMEPLPPPPVPSPDASVLFANRAHVNLLLGNHRRALDDAARAVQLSPSNVKAYYRAAKAAIALGLLPEAAAFCRRGIEQDPANEELKKLLAQVDAQQSEQDRHRAKVAQAVSAAKDIVAAIEKRGLKLGKAAYQELTGVKKPKLDEQGVLHWPVLLLYPEVMSSDFIEDFPETDTFVPHLDVMFSESSPPLPWDDKHAYTRDAVELYYQAGVGTVLSKSEILKILLEGTMDSKSLPESLLDEEDGENDDGKSSTITSSDKGSVKWINVKEGKTLQEVLQHKDFIIPAIPVFFVVSRKSTFYRKFKAGNWSLP

SEQ ID NO: 506 - protein, 353 aa, Zea mays
MAKYGEGDKRWIVEERADGTNVHNWHWAERDCIEWSRARLSSLLAGLTVLDGEDGLTLRTVALDNLDGEAYVNIRKGKVIPGYELSLTLSWEAEAASESGAVKVAGTAEVPYLADENADEDPDLHITVRGDETPLALRAKDAFLSRGKPMVLEKIREFVAAMAKGGPAKDELDSKKTPAKVAAAAPGAAPAKKEEVVAPAPAAGKKKAKGKDKEGFKTIKMTETFYCRSKDIYEILMDENRWKGFTQSNAKISREVGGEFSLFDGCITGVNEDLQEGKLIAQKWRFGSWPDGLYSSVRLMLDEPESGVTVIKLKQTGVPEEDKYGNSTVVENTERGWRDLIFQRIRGMFGFGI

SEQ ID NO: 507 - protein, 581 aa, Zea mays
MADEAKAKGNAAFSAGRFEEAARHFTDAIALAPDNHVLYSNRSAALASLHRYSDALADAQKTVDLKPDWAKGYSRLGAAHLGLGDAASAVAAYEKGLELDPSNEGLKAGLQDAKKAAAAPPRRGSSGPDAIGQMFQGPELWSKIASDPSTRAYLNEPDFMHMMREVQRNPSSISMYLSDPRMMQVLSLMLNVKIQRPEASEPSQSTPPPPKQQQQQQTPPSETKARDVEPEPEAEPMDLTDEEKDRKQTKAAAQKEKELGNAAYKKKDFEVAIQHYTKALELDDEDISYLTNRAAVYIEMGKYDECIKDCDKAVERGRELRADFKMISRALTRKGTALVKLAKTSKDFDIAIETFQKALTEHRNPDTLKKLNEAEKAKKELEQQEYYDPKLADEEREKGNEFFKEQKYPEAIKHYTEALKRNPKDPRVYSNRAACYTKLGAMPEGLKDAEKCLELDPTFTKGYTRKGAIQFFMKEYDKAVETYQAGLKHDPNNQELLDGVKRCVEQINKANRGEISQDELQERQNKAMQDPEIQNILTDPIMRQVLIDFQENPSAAQEHLKNPGVMQKIQKLVSAGIVQMR

SEQ ID NO: 508 - protein, 399 aa, Aspergillus nidulans
MDASKLRELRDFVEACKKNPSLLADPNLSFFRDYLQSLGAKIPAAAPSFESPKRSSMDDIDDDGDDDDDLDMRDPTPERDELDEEIVESDLELEGEIVQSDHDDPPQKMGNPSVEVTEENRDASQEAKGKAMEAISEGKLEDAIEHLTNAIVLNPLSAIMYGTRASVFIKMKKPAAAIRDANAALEINPDSAKGYKTRGMAYAMLGKWEEAAHDLHTASNMDYDEEINAVLKKVEPNAHKIVEHRRKYERLRKEREEKRAQRDRLRQRAEAQAAYDKAKRKEQSSSRSSGGASPRGFPGGMPGGGFPRGMPGGGFPGGGMPGGFPGGGMPGGFPGGVPGNVDMSKILNDPDLMAAFSDPEVMAALQDVMNNPANFAKHQANPKVGPIIAKMMAKFNGSQ

SEQ ID NO: 509 - protein, 273 aa, Oryza sativa
MSPAADSAASKRQAELLKQEGNAFFKKDRISAAIDAYTGAIALCPKVAVYWTNRALCYKRRNEWVRAEEDCRTAIQLDSHSVKAHYMLGLALLNKDELAEGIKELEKSLELGRGAHPASYMVEEIWQELSKAKYIEWENLSSERVRQLHKLKEACKEALRNYNSLDNPPAYVPEEQLNELEEVFRNARKSDIPTEVPDHLCCKITLDIFRDPVITPSGITYERAVILDHLHRVGKFDPVTRETLEPHQLVPNLAIKEAVHAFLSEHGWAYRMR

SEQ ID NO: 510 - protein, 275 aa, Zea mays
MAPAAPYGGAESQRQADLLKQEGNAFFRKERLSAAIDAYTGAITLCPNVAVYWTNRALCYRKRNEWTRVEEDCRTAIQLDSQSVKAHYMLGLSLVNSQRLSEGIKSLEKSLELGRGAHPASYMVEEIWQELSKAKYIEWESLSRDRTCQLQKLKVACKEALTSYNSLDNPAAGAPVEQLNELEEVFKKAAKTDTPAEVPDHLCCKITLDIFRDPVITPSGITYERAVLLDHLQTVGRFDPVTREALEPHQLVPNLAIKEAVHAFLSEHGWAYKIR

SEQ ID NO: 511 - protein, 808 aa, Zea mays
MRKWALSSALLLLFLLTTLPDPAKKLQVNAEESSDDLANPPKVEEKLGAVPHGLSTDSEVAQREAESISRKTLRSSAEKFEFQAEVSRLMDIIINSLYSNKDIFLRELISNASDALDKIRFLSLTDKEVLGEGDTAKLEIQIKLDKEKKILSIRDRGIGMTKEDLINNLGTIAKSGTSAFVEKMQSGGDLNLIGQFGVGFYSVYLVADYVEVVSKHNDDKQYVWESKADGSFAISEDTWNEPLGRGTEIRLHLRDEAKEYLEEDKLKDLVKKYSEFINFPIYLWSTKEVDVEVPADEDETSEEEDSSPETTEEETEEDEEKEKKPKTKTIKETTSEWELLNDMKAVWLRSPKEVTDEEYSKFYHSLAKDFGDDKPMGWSHFTAEGDVEFKALLFIPPKAPHDLYESYYNSNKSNLKLYVRRVFISDEFDDLLPKYLSFLRGIVDSDTLPLNVSREMLQQHSSLKTIKKKLIRKALDMIRKLAEEDPDEYSNKDKTDEEKNEMEEKKGQYAKFWNEFGKSIKLGIIEDATNRNRLAKLLRFESTKSDGKLASLDEYISRMKPGQKDIFYLTGSSKDQLEKSPFLERLTKKNYEVIFFTDPMDEYLMQYLMDYEDRKFQNVSKEGLKLGKDSRLKDLKESFKELTEWWKKALESESVDSVKVSSRLHDTPCVVVTSKYGWSANMEKIMQAQTLSDSSKQAYMRGKRVLEINPRHPIIKELRDKVAQDNESEELKQTARLVYQTALMESGFNLPDPKEFASSIYKSVHKSLDLSPDAAVEEEDEAEEQPEVEEKEPAAKEGSEPSFDKDEL

SEQ ID NO: 512 - protein, 811 aa, Oryza sativa
MRKWALSSALLLLLLLTTLPDPAKKLQVNADDSTDELVDPPKVEEKIGGVPHGLSTDSEVVQREAESISRKTLRSSAEKFEFQAEVSRLMDIIINSLYSNKDIFLRELISNASDALDKIRFLALTDKEVLGEGDTAKLEIQIKLDKEKKILSIRDRGIGMTKEDLIKNLGTIAKSGTSAFVEKMQTGGDLNLIGQFGVGFYSVYLVADYVEVISKHNDDKQHVWESKADGSFAISEDTWNEPLGRGTEIRLHLRDEAKEYVEEDKLKDLVKKYSEFINFPIYLWATKEVDVEVPADEDESSESSEEEESSPESTEEEETEESEEKKPKTKTVKETTTEWELLNDVKAIWLRSPKEVTEEEYTKFYHSLAKDFGDDKPLSWSHFTAEGDVEFKALLFVPPKAPHDLYESYYNSNKSNLKLYVRRVFISDEFDELLPKYLSFLKGLVDSDTLPLNVSREMLQQHSSLKTIKKKLIRKALDMIRKLAEEDPDEYSNKDKTDEEKSAMEEKKGQYAKFWNEFGKSVKLGIIEDATNRNRLAKLLRFESTKSEGKLASLDEYISRMKPGQKDIFYITGSSKEQLEKSPFLERLTKKNYEVIYFTDPVDEYLMQYLMDYEDKKFQNVSKEGLKLGKDSKLKDLKESFKELTDWWKKALDTESVDSVKISNRLSDTPCVVVTSKYGWSANMEKIMQSQTLSDASKQAYMRGKRVLEINPRHPIIKELRDKVAQDSESESLKQTAKLVYQTALMESGFNLPDPKDFASSIYRSVQKSLDLSPDAAVEEEEEVEEAEVEEKESSNIKEEAEPSSYDKDEL

SEQ ID NO: 513 - protein, 787 aa, Zea mays
MAPALSGTLGASSVAALRPCAGRRAPSAASSVAPRGSGVVRCSRGLRWDAHRSRGRLLRVRCDAAVAEKPAEEEAAGEKFEYQAEVSRLMDLIVHSLYSHKEVFLRELVSNASDALDKLRFLGVTDSSLLADGGELEIRIKPDLDAGTITITDTGVGMTKDELKDCLGTIAQSGTSKFLKALKENKDLGADNGLIGQFGVGFYSAFLVAEKVVVSTKSPKSDKQYVWEAVADSSSYVIKEETDPEKMLTRGTQITLFLRPDDKYEFADPSRIQGLVKNYSQFVSFPIYTWQEKSRTVEVEEDEEPKEVEEATKGEKKKKTITEKYWDWELANETKPIWMRNPKEIENTEYNEFYKKTFNEFLDPLAHTHFTTEGEVEFRSVLYVPGMAPLSNEEIMNPKTKNIRLYVKRVFISDDFDGELFPRYLSFVKGVVDSNDLPLNVSREILQESRIVRIMRKRLVRKTFDMIEEIAEKEDKEDYKKFWESFGKFVKLGCIEDTGNHKRLAPLLRFHSSKNEGDLISLDQYVESMPESQKAIYYIATDSLQSAKTAPFLEKLVQKDIEVLYLIEPIDEVAIQNLQTYKEKKFVDISKEDLELGDEEEETKETKQEFTLLCDWVKQQLGDKVAKVQISKRLSSSPCVLVSGKFGWSANMERLMKAQTLGDTSSLEFMRGRRIFEINPDHPIIKDLSAACKNEPESTEARRAVELLYEAALISSGYTPESPAELGGKIYEMMAIALGGRWGRSDMEEAEASTGEASAEADSSEVTVAEVIEPSEVRPESDPWRDQ

SEQ ID NO: 514 - protein, 716 aa, Sorghum bicolor
MASADVHMAGGGAETETFAFQAEINQLLSLIINTFYSNKEIFLRELISNASDALDKIRFESLTDKSKLDAQPELFIRLVPDKATKTLSIIDSGVGMTKSDLVNNLGTIARSGTKEFMEALAAGATDVSMIGQFGVGFYSAYLVADKVVVTTKHNDDDQYVWESQAGGSFTVTLDTTGERLGRGTKITLFLKDDQLEYLEERRLKDLVKKHSEFISYPIYLWTEKTTEKEISDDEDDEDKKEGDVEEVDDDDGDKDDKDSKTTKKKKKVKEVTHEWVQINKQKPIWLRKPEEITREEYASFYKSLTNDWEDHLAVKHFAVEGQLEFKAILFVPRRAPFDLFDTRKKLNNIKLYVRRVFIMDNCEELIPEWLGFVKGVVDSDDLPLNISRETLQQNKILKVIRKNLVKKCIEMFFEIAENKDDYAKFYDAFSKNIKLGIHEDSQNRAKLADLLRYHSTKSGDEMTSLKDYVTRMKEGQKDIYYITGESKKAVENSPFLERLKKKGYEVLFMVDAIDEYAVGQLKEYDGKKLVSATKEGLKLDDDDEEAKKRREERKKQFEDLCKVIKDILGDRVEKVVVSDRIVDSPCCLVTGEYGWTANMERIMKAQALRDSSMSAYMSSKKTMEINPDNGIMEELRKRAEADRNDKSVKDLVLLLFETALLTSGFSLDDPNTFAARIHRMLKLGLNIDEDAAADEDADMPALEEGAAEESKMEEVD

SEQ ID NO: 515 - protein, 699 aa, Oryza sativa
MASETETFAFQAEINQLLSLIINTFYSNKEIFLRELISNSSDALDKIRFESLTDKSKLDAQPELFIHIVPDKASNTLSIIDSGVGMTKSDLVNNLGTIARSGTKEFMEALAAGADVSMIGQFGVGFYSAYLVAERVVVTTKHNDDEQYVWESQAGGSFTVTRDTSGEQLGRGTKITLYLKDDQLEYLEERRLKDLVKKHSEFISYPISLWTEKTTEKEISDDEDEEEKKDAEEGKVEDVDEEKEEKEKKKKKIKEVSHEWNVMNKQKPIWLRKPEEITKEEYAAFYKSLTNDWEEHLAVKHFSVEGQLEFKAILFVPKRAPFDLFDTRKKQNNIKLYVRRVFIMDNCEELIPEWLSFVKGIVDSEDLPLNISREMLQQNKILKVIRKNLVKKCVELFFEIAENKEDYNKFYEAFSKNLKLGIHEDSTNRTKIAELLRYHSTKSGDELTSLKDYVTRMKEGQSEIYYITGESKKAVENSPFLEKLKKKGYEVLYMVDAIDEYAVGQLKEFEGKKLVSATKEGLKLDESEDEKKRQEELKEKFEGLCKVIKEVLGDKVEKVVVSDRVVDSPCCLVTGEYGWTANMERIMKAQALRDSSMAGYMSSKKTMEINPENAIMDELRKRADADKNDKSVKDLVMLLFETALLTSGFSLEDPNTFGTRIHRMLKLGLSIDEDESAEADADMPPLEDDAGESKMEEVD

SEQ ID NO: 516 - protein, 652 aa, Oryza sativa
MMDGAAPLLPETSPESRQQRDPERGKRRTPVLPAVVASAVVLLGLAALFLVYGFHDGGDGRAAVLAPGTVEVAASSSRGVVEGVSEKSTTPALRLGGGAVRDYAWTNSMLSWQRTAFHFQPPNNWMNGPLYYKGWYHLFYQWNPDSAVWGNITWGHAVSRDLIHWLHLPLAMVPDHWYDINGVWTGSATQLPDGRIVMLYTGATEESVQVQNLAEPADPNDPLLREWSKAEANPVLVPPPGIGLTDFRDPTTAWRNPADSAWRITIGSKDRDHAGLALVYKTEDFLHYDLLPTLLHVVKGTGMWECVDLYPVSTSPAVEDGLETSTPPGPGVKHVLKASLDDDRNDYYAIGTYDGETDTWTPDNADIDVGIGLRYDYGKFYASKTFYDPVGRRRVLWGWIGETDSERADILKGWASLQSIPRTVMLDTKTGSNLLQWPVVEVENLRMRGKSFDGLDVSPGSVVPLDVGKATQLDIEAVFEVDTSAADGVVTEAGAAAYSCGTGGGAVGRGLMGPFGLLVLADDQLSERTAVFFYLVKGVDGNLTTFFCQDELRSSKANDLVKRVYGSLVPVLDGENLSIRILVSLSSNVDHSIVEGFAQGGRTCITSRVYPTKAIYESAKIFLFNNATNVRVTAKSLKIWELNSAYIRPYVD

SEQ ID NO: 517 - protein, 911 aa, Zea mays
MIQMNMKQPLVLPAHRGNVIGSRLASSPSPVAAAAAAASRRRGVVSSPRSRLQRHMRLPRISCSATEEASGAVSAVTVEKMLTVTASVQAAPAIGQMYFQRALDDAGDFFGKTLLMELVSSEVDAKTGLEKPRVTAFAHKTLREGHYEAEFKVPASFGPVGAVLLENEHHKEIFIREIKLVTGSDSSTAVTFGCNSWVHSKFDNPEKRIFFTLKSYLPSDTPKGLEDLRKKDLQALRGDGHGERKASERVYDYDVYNDLGDPDKNPAHQRPVLGGSKRYPYPRRCRTGRPRTRKDPEAEVRHGHNYVPRDEQFSEVKQLTFGATTLRSGLHALLPAIRPMLIKRELRFPHFPAIDDLYSDGIPLPAQTGLGAIRSIVPRVVKLVEDTTEHVLRFELPDMIERDRFSWFKDEEFARQTIAGLNPLCIQLLTEFPIRSKLDPEVYGPAESAITKEILEKHMSGGAAMTVEQALAAKRLFILDYHDVFLPYVHRVRELPDTTLYGSRTVFFLTDLGTLMPLAIELVRPKSPTQPQWKRVFTHGPDATDAWLWKLAKAHVVTHDTGYHQLVSHWLRMHCCVEPYIIAANRQLSRLHPVYRLLHPHFRYTMEINALAREALINADGIIEESFWPGRYAVELSSAAYGATWQFDTEALPNDLVKRGLAVRRDDGELELTIKDYPYAHDGLMVWNTIRQWAADYVNVYYKSDEAVAADPELKAFWDEVRNVGHGDKKDEPWWPVLDTRDSLAETLTTIMWVTSGHHSAVNFGQYHFGGYFPNRPTTIRKSMPVEEEAGRDEEMKKFLKQPETTLLDMLPTQMQAIRVMTTLDILSSHSPDEEYMGELAEPSWLEEPMVKAAFEKFGGRMKEIEGFIDECNNNPELRNRCGAGIVPYELLKPFSKPGVTGRGIPNSISI

SEQ ID NO: 518 - protein, 482 aa, Zea mays
MASSDHGSTTAPKDVPGSYGLPLVGAVRDRLDFYYFQGQDKYFESRVERYGSTVVRMNVPPGPFMARDPRVVAVLDAKSFPVLFDMDKVEKKDLFTGTYMPSTSLTGGYRVCSYLDPSEPTHTKVKQLLFSLLLSRKDDVIPTFRSNFSSLLATVEAELAKGGKAEFNKLNDVTSFDFIGEAYFGVRPSATDLGKGGPTKAAKWLIWQLHPLVTLGLPMVLEEPLLHTFHLPPFLVKGDYRALYKYFSTVAKQALDTAEGLGLSREEACHNLLFATTFNSYGGLKVLFPGLLANVASGGEKLHERLVAEIRGAVADAGGKVTLAAVERMELAKSVVWESLRLDPPVKFQYGHAKKDLLVESHDAVFQVRKGEMLFGYQPCATKDPRVFGDTAGDFVPDRFLGEEGSKLLQYVYWSNGRETENPSVDNKQCPGKNFVVLVGRLLLVELFLRYDTFTAEVGKELLGTSVIFTGVTKATSGPGSE

SEQ ID NO: 519 - protein, 591 aa, Zea mays
MGGEAEGGERRLGRVLSFGIPDTALGLVMGYVEDPWDRDAISLVCRHWCRVDALSRKHVTVAMAYSTTPERLFRRFPCLESLKLKAKPRASMFNLISDDWGGSASPWIRQLSATFHFLKKLHLRRMIVSNEDINILVRAKAHMLVALKLDRCSGFSTPSIALVARSCRKLETLFLEESTIDEKENDEWIRELATSNSVLETLNFFLTDLRASPEYLTLLVRNCQRLKTLKISECFMPDLVSLFRTAQTLQEFAGGSFEEQGQPVASRNYENYYFPPSLHHLSLLYMGTNDMQILFPYATALKKLDLQFTFLSTEDHCQIVQRCSNLETLEVRDVIGDRGLQVVAQTCKKLHRLRVERGDDDQGGLEDEQGRISQVGLMAIAQGCPELTYWAIHVSDITNAALEAVGTCSKNLNDFRLVLLDREAHITELPLDNGVRALLRGCTKLRRFAFYVRPGALSDVGLGYVGEFSKSIRYMLLGNVGESDNGIIQLSKGCPSLQKLEVRGCLFSEHALALAALQLKSLRYLWVQGFRSSPTGTDIMAMVRPFWNIEYIVPDQDEPCPEHKRQILAYYSLAGRRTDCPPSVTLLYPAF

SEQ ID NO: 520 - protein, 598 aa, Zea mays
MGGEVPEPRRLSRALSFGCGGVPEEALHLVFGYMDDPRDREAASLVCRLWHRIDALSRKHVTVGFCYAVEPARLLARFPRLESLALKGRPRAAMYGLIPEDFGAYAAPWVAELAAPLDCLKALHLRRMTVTDEDIAVLVHARGHMLQALKLDKCSGFSTDALRLVARSCRSLRTLFLEECIIEDEGSEWLHELAVNNSVLVTLNFYMTELKVEPADLELLAKNCKSLISLKMGDCDLSDLIGFFQTSKALQEFAGGAFFEVGEYTKYEKVIFPPRLCFLGGLTFMGKNEMPVIFPYSTMLKKLDLQFTFLTTEDHCQLIAKCPNLSVLEVRNVIGDRGLEVVAATCKKLRRLRIERGDDDPGQEEQGGVSQIGLTAVAVGCRELEYIAAYVSDITNGALESIGTFCKNLYDFRLVLLDKQKKITDLPLDNGVRALLRNCVKLRRFAFYLRPGGLSDVGLGYIGLYSGNIQYMLLGNVGESDNGLIQFATGCTNLRKLELRGCCFSERALAVAVLQMPSLRYIWVQGYRASRTGQDLMLMARPYWNIEFAPPIPESAYRVMADGQPCVDTHAQVLAYYSLAGRRPDCPQWLVTLHPASL

SEQ ID NO: 521 - protein, 660 aa, Zea mays
MSREAQKLDCTAAGGGIGVLSLDLLGQVLEHLREPRDRKTCRLVSRAFERAEAAHRRALRVLRREPLPRLLRAFPALERLDLSACASLDDASLAAAVADAGGGLAGLRSVCLARANGVGWRGLEALVAACPKLAAVDLSHCVSAGDREAAALAAASELRDLRLDKCLAVTDMGLAKVAVGCPKLEKLSLKWCREISDIGIDLLAKKCPELRSLNISYLKVGNGSLGSISSLERLEELAMVCCSGIDDEGLELLSKGSDSLQSVDVSRCDHVTSEGLASLIDGRNFLQKLYAADCLHEIGQRFLSKLARLKETLTLLKLDGLEVSDSLLQAIGESCNKLVEIGLSKCSGVTDGGISSLVARCSDLRTIDLTCCNLITNNALDSIADNCKMLECLRLESCSLINEKGLKRIATCCPNLKEIDLTDCGVDDAALQHLAKCSELRILKLGLCSSISDRGIAFISSNCGKLVELDLYRCNSITDDGLAALANGCKRIKLLNLCYCNKITDTGLGHLGSLEELTNLELRCLVRVTGIGISSVAIGCKNLIELDLKRCYSVDDAGLWALARYALNLRQLTISYCQVTGLGLCHLLSSLRCLQDIKMVHLSWVSIEGFEMALRAACGRLKKLKMLCGLKTVLSPELLQMLQACGCRIRWVNKPLVYKD

SEQ ID NO: 522 - protein, 317 aa, Zea mays
MAATVSSFPVVNMEKLETEERATAMEVIRDGCENWGFFELLNHGISHELMDEVERLTKAHYATFREAKFQEFAARTLEAGEKGADVKDVDWESTFFVRHLPASNLADLPDVDDRYRQVMEQFASEIRKLSERLLDLLCENLGLEPGYLKAAFAGSDGPTFGTKVSAYPPCPRPDLVDGLRAHTDAGGIVLLFQDDQVSGLQLLRGGEWVDVPPMRHAIVANVGDQLEVITNGRYKSVMHRVLTRPDGNRMSVASFYNPGADAVIFPAPALVGAAEEDRAEAAYPSFVFEDYMNLYVRHKFEAKEPRFEAMKSAIATA

SEQ ID NO: 523 - protein, 487 aa, Oryza sativa
MVSQVVAEEKPQLLSKKAGCNSHGQDSSYFLGWQEYEKNPFDPVSNPSGIIQMGLAENQLSFDLLEEWLEKNPHALGLRREGGGASVFRELALFQDYHGLPAFKNALARFMSEQRGYKVVFDPSNIVLNAGATSANEALMFCLADHGDAFFIPTPYYPGFDRDLKWRTGAEIVPVHCASANGFRVTRAALDDAYRRAQKRRLRVKGVLITNPSNPLGTASPRADLETIVDFVAAKGIHLISDEIYAGTAFAEPPAGFVSALEVVAGRDGGGAGVSDRVHVVYSLSKDLGLPGFRVGAIYSANAAVVSAATKMSSFGLVSSQTQYLLAALLGDRDFTRSYVAENKRRIKERHDQLVDGLREIGIGCLPSNAGLFCWVDMSHLMRSRSFAGEMELWKKVVFEVGLNISPGSSCHCREPGWFRVCFANMSAKTLDVAMQRLRSFVDSATGGGDNAALRRAAVPVRSVSCPLAIKWALRLTPSIADRKAER

SEQ ID NO: 524 - protein, 371 aa, Zea mays
MGSGGANTAPLLTPYKMGKFDVTHRVVLAPLTRQRSYGNVPQPHAILYYQQRATKGGLLIAEATGVSDTAQGYKDTPGIWTHEQVEAWKPIVDGVHQKGGIFFCQIWHVGRVSNSTFQPNGQAPISSTDKPLKPQVRANGIDVATFAVPRRLETDEIPLVVNDFRVAARNAIEAGFDGVEIHGAHGYLIDQFLKDGVNDRTDKYGGSLENRCRFALEVTQAVVDEIGADKVGIRLSPFASYSEAPDSDPEALGMYMANALNEFGILYCHMVEPRMVKLGEKFETPYSLRPIRDAFRGTFIVAGGYGREDGNRAISTGYADLVAFGRLFLANPDLPRRFEVDAPLNKYNRDTFYIPDPVVGYTDYPFLSSDV

SEQ ID NO: 525 - protein, 359 aa, Zea mays
MTRCRAPDAIPGPALAEYYAQRSTEGGLLISEGTIISPSGPGFPRVPGIYNQEQTDAWRKVVDAVHAKGAIFFCQLWHVGRASHQVYQPGAAAPISSTDKPISSRWRILMPDGSYGKYPTPRRLATSEIPEIVEQYRQAAVNAIKAGFDGIEIHGAHGYLIDQFLKGGINDRTDEYGGSLSNRCRFLLEVTRAVVSAIGADRVAVRVSPAIDHLDAYDSNPLQLGLAVVERLNALQQEAGRLAYLHVTQPRYTAYGQTESGQHGSAEEESRLMRAVRGAYRGTFMCSGGYTRELGVEAIESGDADLVSYGRLFIANPDLVERFRRDAPLNKYVRKTFYTPDPVVGYTDYTFLGQPKARM

SEQ ID NO: 526 - protein, 373 aa, Zea mays
MVQQAAKEVIPLLTPYKMGQFELSHRVVLAPLTRCRSYGNVPQPHAAVYYSQRATRGGLLIAEATGVSATAQGFPESPGIWTQEQVEAWKPIVDAVHRKGAIFVCQIWHVGRVSTNELQPNGDAPISSTDKQISPDAKSGTAYSKPRRLRTDEVPGIVDDFRRAARNAIQAGFDAVEIHGAHGYLLEQFMKDSCNDRTDQYGGSLENRCRLAVEVVDAVVREVGARRVGIRLSPFVDFVDCVDSDPVALGHYMVQQLNRHSGLLYCHMVEPRITAHGRRQIPHGLLPFRKAFHGTFIAAGGYDREEGNKVVAEGYADLVAYGKLFLANPDLPRRFELDVALNKYDRSTFYTQDPIVGYTDYPFFEEEDGKNER

SEQ ID NO: 527 - protein, 504 aa, Zea mays
MLPSFVSPTASAAASVTPPPRPIPGSYGPPVLGPLRDRLDYFWFQSQDEFFRKRAAAHRSTVFRTNIPPTFPFFVGVDPRVVAIVDAAAFTALFDPDLVDKRDILIGPYNPGAGFTGGTRVGVYLDTQEEEHARVKTFAMDLLHRSARTWSADFRASVGAMLDAVDAEFGKDDGSDKKPSASYLVPLQQCIFRFLCKAFVGADPSADWLVDNFGFTILDIWLALQILPTQKIGLVQPLEELLIHSFPLPSFLIWPGYYVLYRFIEKHGAEAVAYAEAQHGIGKKDAINNMLFVLGFNAFGGFSVFLPFLVAKVGGAPALRERLRDEVRRAMVGKGKDGEFGFATVREGMPLVRSTVYEMLRMQPPVPLQFGRARRDFVLRSHGGAAYQVSAGEVLCGYQPLAMRDPEVFERPEEFVPERFLGDDGARLLQHLFWSNGPETAQPGPGNKQCAAKEVVVDTACMLLAELFRRYDDFEVEGTSFTKLVKRQASPSVAQAAAAAGAQQ

SEQ ID NO: 528 - protein, 370 aa, Glycine max
MKVAQVLHMNGGVGHASYANNSLLQQKVICLTKPIREEAITSLYCNTVPRSLAVADLGCSSGPNTLLVVSEFIKIVEKLCRELNHKSPEYKVFLNDLPGNDFNNIFKSLDSFKKKLCDEMESGIGPCYFSGVPGSFYGRVFPNQSLHFVHSSYSLHWLSKVPEGVDNNRGNVYIGSTSPTNVARAYYEQFQRDFSLFLKCRAEELVKGGRMVLTFLGRRSDDPSSKDGGYVWELMATALNDMVLQGIIKEEQLDTFNIPLYTPSPSEVKLEVLKEGSFASNRLEVSEVNWNAFDDWNALEFESERSDTLSDGGYNVAQCMRAVAEPMLVSHFGEAIIEEVFSRYQQILTDRMSKEQTKCINVTVLLTRKA

SEQ ID NO: 529 - protein, 382 aa, Zea mays
MKVERDLHMSRGDGEDSYASNSRLQEKSILKTRPVLHKAVAAAHALSLSSGGPGGGAMVVADLGCSSGPNTLLVVSEVLAAVAMVAGGSAQPQHVQFFLNDLPGNDFNLVFRSLDLLKNKKLAAKDRREESLLPPYYVAGLPGSFYTRLFPDHCVHLFHSSYCLMWRSKVPDELAGGAVLNEGHMYIWETTPQAVVALYRRQFQEDMSLFLRLRHRELVPGGHMVLAFLGRKKSKDVLRGEVSYTWGLLAQALQSLVKQGRVKKDKLDSFNLPFYAPSMDEVRDVITRSQAFDITHIQLFESNWDPHDDDDVEMKMEEDVAAVQSGVNVARSIRAVIGPLIARHFGEHILDDLFELHAKNVAVHLQKVKTKYPVIVVSLQAK

SEQ ID NO: 530 - protein, 382 aa, Zea mays
MSMRIERDLHMATGNGETSYTKNSRIQEKAMFQMKSVLEEATRAVCTALLPQTMVVADLGCSSGPNTLRFVTEVTRIIAHHCKLEHNRRHDHPLQLQFFLNDLPGNDFNNLFQLIEQFNKSSTTHKGDAATEALQPPCYISGLPGSYYTRIFPSESVHLFHSLFCLQWRSQAPEQLKGTQKSCLDIYITKTMSPSMVKLFQQQFQKDFSLFLRLRYEELVSGGQMVLTFIGRKHEDVFTGESNHLYGLLAQSLKSLVDEGLVEKEKLESFYLPIYSPSVGEVEAIVKQLGLFNMNHVKVFEINWDPYDDSEGDDVHNNIESGENVAKCLRAVMEPLVASQFGERILDKLFKEYARRVAKHLENEKTKHAVLVLSIKKAIIHV

SEQ ID NO: 531 - protein, 399 aa, Saccharomyces cerevisiae [sequence omitted]

SEQ ID NO: 532 - protein, 911 aa, Zea mays
MAFKGLPRDSRGSLEVFNPDAPVSDRATTSPFLLPPAVASHPSLLAAGDGGDADVGRATQRAAEWGLVLQTDEHTGRPQGVVARPSGSNRTSESGNSIDERAAAAGAGRALPRVSEELRAALSAFQQTFVVSDATRPDHPILYASAGFFNMTGYSSNEVVGRNCRFLQGSGTDPVEISKIRQALAAGSNYCGRILNYKKDGTPFWNLLTVAPIKDEDGRVLKFIGMQVEVSKYTEGNKDTALRPNGLPESLIKYDARQKDHARSSVSELLLALKDPRSLSESRNNTLKRKSQESAGSALVPGKRSSETGSRRNSHSGMRNSLQKISEVPEGGNKTRKSGLRSFMGLIGMGHGNVEKNILKPREDPLLDSDDERPDSFDDDFRKKEMRKGIDLATTLERIEKNFVITDPRLPDNPIIFASDSFLRLTEYCREEILGRNCRFLQGPETDRGTVKKIRDAIDNQTEVTVQLINYTKSGKKFWNLFHLQPMRDQKGDVQYFIGVQLDGTERVREAAAKDGAILVKKTADNIDEAAKELPDANLRPEDLWANHSKPVLPKPHMKDTASWRAIQKVLENGESIDLKHFRPVRPLGSGDTGSVHLVELLGTGEYFAMKAMDKSVMLNRNKVHRATAERQILDMLDHPFLPTLYASFQTKTHICLIVDYCAGGELFMLLDRQPMKVLKEDAVRFYAAEVVTALEYLHCQGIIYRDLKPENILLHRDGHISLTDFDLSCLTSCRPQVFLPHDIDKKKKRRKSRSNPIFFAEPMRASNSFVGTEEYIAPEIITGAGHTSAVDWWALGILLYEMLYGYTPFRGKTRQRTFANILHKDIRFPASIQVSLAARQLIYRLLHRDPANRLGSYEGAMEIKQHPFFRGINWALVRAATPPELEAPLQDTLEATLPPPAADAAHTDMF

SEQ ID NO: 533 - protein, 229 aa, Zea mays
MAAARRLSLPLVLLVVLAVAGRAAAQDYDFFYLVLQWPGAYCDTKQSCCYPKSGKPAADFGIHGLWPNRDDGTYPQNCSPDNAFNPSKVSDLMSSLRAKWPTLACPSNDGLRFWGHEWEKHGTCAADVFDEHGYFQAALRLRDQLGVLGALTSAGVKPDGGYYTLSQIKGAIRQGTGFEPYVECNRDEAGNSQLYQLYFCVDAAGDSFVDCPVLPSGRPCGNRIEFPAF

SEQ ID NO: 534 - protein, 701 aa, Zea mays
MRLSSSLQDLPTFTRIDALERGSSVGSDLSSGRPKPVRMLQRDGAVASFSKERTPPSSPTNRKKCMRAAGCAIALILLVFFAYGSWRYFHVFLSEGRSEYYVVLDCGSTGTRVYVYEWHINHNDANAFPIVLKPLGNAPKKKSGKLTRLYQRMETEPGLSKLVHNESGLKKAIEPLLQMAEKLIPRHAHKHTPLFLYATAGVRKLPSADSEWLLDKSWDILNNSSFLCSRDRVKIISGMDEAYYGWIALNHNMDMLGTSSSKMTYGSLDLGGSSLQVTFENDKSVQDETSIRLSIGSVEHHLSAYSLTGYGLNDAFDKSVAHLVKRLGGVASNGKVQVKHPCLQTGFKEDYICSYCHPLKQDGSPSVGEKNSGKEKQGIAVELVGAPQWNECSALAKVTVNLSEWSSASPGLDCNIHPCALASNFPRPYGQFFAISGFYVVFKFFNLTADATLGDVQKRGQEFCEKPWKVAKSSVPPQPFVEQYCFRAPYISSLLREGLQIKDSQVIIGSGSITWTHGVALLEAGQALSSRLDIQGYRILHREINPNILIVLFLISIVLVICAILCVSNSIPRSFRKSYLPIHRHNSGGSSVLGMGLPFKHLLWNPISSGDGRTKTPLSPTVAGSDPHPFAGLGGSSVELMESSRQSLGAYHSYSVGSLGQMQFSSGVRNPSRGQTTLQSRRSQSREDLSSSLADIHFPKV

SEQ ID NO: 535 - protein, 467 aa, Saccharomyces cerevisiae
MFKSVVYSILAASLANAGTIPLGKLADVDKIGTQKDIFPFLGGAGPYYSFPGDYGISRDLPEGCEMKQLQMVGRHGERYPTVSLAKTIKSTWYKLSNYTRQFNGSLSFLNDDYEFFIRDDDDLEMETTFANSDDVLNPYTGEMNAKRHARDFLAQYGYMVENQTSFAVFTSNSKRCHDTAQYFIDGLGDQFNITLQTVSEAESAGANTLSACNSCPAWDYDANDDIVNEYDTTYLDDIAKRLNKENKGLNLTSTDASTLFSWCAFEVNAKGYSDVCDIFTKDELVHYSYYQDLHTYYHEGPGYDIIKSVGSNLFNASVKLLKQSEIQDQKVWLSFTHDTDILNFLTTAGIIDDKNNLTAEYVPFMGNTFHRSWYVPQGARVYTEKFQCSNDTYVRYVINDAVVPIETCSTGPGFSCEINDFYDYAEKRVAGTDFLKVCNVSSVSNSTELTFYWDWNTTHYNASLLRQ

SEQ ID NO: 536 - protein, 533 aa, Glycine max
MAGELGVLNALDVAKTQWYHFTAIVIAGMGFFTDAYDLFCISLVTKLLGRLYYTEPGAPKPGSLPPRVQASVTGVALCGTLAGQLFFGWLGDKMGRKRVYGLTLILMVVCSLASGLSFGSTPEGVMASLCFFRFWLGFGIGGDYPLSATIMSEYANKKTRGAFIAAVFAMQGFGILAGGVVALIVSYAYDQKYKLPSYEQNPEASLDPAFDYVWRIVLMFGAVPAALTYYWRMKMPETARYTALVAKNAKQAAADMSKVLQVELEAEEEKVKKLTENESNKYGLFTKEFVKRHGLHLLGTTTTWFLLDIAFYSQNLFQKDIFSAIGWIPPAKEMNAIHEVYKIARAQTLIALCSTVPGYWFTVALIDYMGRFAIQLLGFFFMTVFMFALAIPYDHWSEKENRIGFVVMYSFTFFFANFGPNSTTFVVPAEIFPARLRSTCHGISAAAGKAGAIVGAFGFLYAAQSKDPSKTDAGYPTGIGIKNSLIMLGVINFIGMLFTLLVPESKGKSLEELSGENGENDAEHAVSARTVPV

SEQ ID NO: 537 - protein, 541 aa, Zea mays
MARGGDGLQVLSALDAAKTQWYHFTAIIVAGMGFFTDAYDLFCISLVTKLLGRIYYTDTSKDNPGSLPPNVAAAVNGVAFCGTLAGQLFFGWLGDKLGRKSVYGMTLMLMVICSVASGLSFGHTPTGVMATLCFFRFWLGFGIGGDYPLSATIMSEYANKKTRGAFIAAVLAMQGFGILAGGIVTLVISAAFRAGYPAPAYRDDHFNSTVPQADYVWRIILILGAAPAMLTYYWRMKMPETARYTALVAKNAKQAAADMSRVLQTEIVDEQEKLDEMVTAESNTFGLFSREFARRHGLHLVGTSTTWFLLDIAFYSQNLFQKDIFTSINWIPKANTMSALEEVFRISRAQTLIALCGTVPGYWFTVALIDVVGRFAIQLLGFFMMTVFMLGLAIPYHHWTTPGNHIGFVVMYAFTFFFANFGPNSTTFIVPAEIFPARLRSTCHGISAASGKAGAIIGAFGFLYAAQNQDKSKADAGYPAGIGVRNSLFVLAASNLLGFILTFLVPESKGKSLEEMSGEADDAEDDAVGTRAVRPSGTQMV

SEQ ID NO: 538 - protein, 429 aa, Xylella fastidiosa
MSDLDKVTLNAGETSLVLPVLKPTLGNGCVDIAKLTKETGLFTYDSGFTATASCKSAITYIDGEKGVLLYRGYPIEQLAEHSSFLEVAYLLMNGELPRKDEFAKFDDEITHHTMMHESLKNFLGGFHYDAHPMAMLAASVASLSAFYHDTLDLNDLEQRRLAAIRLIAKVPTLAAAAHRYSIGWPIRYPRNNLGYVERFLHMMFEVPSEPLQLNPVVTKALDLLFILHADHEQNASTSTVRLVGSTGANPYASVAAGITALWGPAHGGANEAVLKMLEEIGDAKNVDLVIAKAKTKDKNSPFRLMGFGHRVYKHFDPRAKIIREMAHTVLGELGVNDPLLEVALKLEEAALKDDYFVQRKLYPNVDFYSGIIYKAINIPLEMFTVMFAIARTAGWVSHWLEQQVDPEMKISRPRQIYTGHGERDYKDAR

SEQ ID NO: 539 - protein, 427 aa, Escherichia coli
MADTKAKLTLNGDTAVELDVLKGTLGQDVIDIRTLGSKGVFTFDPGFTSTASCESKITFIDGDEGILLHRGFPIDQLATDSNYLEVCYILLNGEKPTQEQYDEFKTTVTRHTMIHEQITRLFHAFRRDSHPMAVMCGITGALAAFYHDSLDVNNPRHREIAAFRLLSKMPTMAAMCYKYSIGQPFVYPRNDLSYAGNFLNMMFSTPCEPYEVNPILERAMDRILILHADHEQNASTSTVRTAGSSGANPFACIAAGIASLWGPAHGGANEAALKMLEEISSVKHIPEFVRRAKDKNDSFRLMGFGHRVYKNYDPRATVMRETCHEVLKELGTKDDLLEVAMELENIALNDPYFIEKKLYPNVDFYSGIILKAMGIPSSMFTVIFAMARTVGWIAHWSEMHSDGMKIARPRQLYTGYEKRDFKSDIKR

SEQ ID NO: 540 - protein, 472 aa, Oryza sativa
MAFFRGLTAVSRLRSRVAQEATTLGGVRWLQMQSASDLDLKSQLQELIPEQQDRLKKLKSEHGKVQLGNITVDMVLGGMRGMTGMLWETSLLDPDEGIRFRGLSIPECQKVLPTAVKDGEPLPEGLLWLLLTGKVPTKEQVDALSKELASRSSVPGHVYKAIDALPVTAHPMTQFTTGVMALQVESEFQKAYDKGMSKSKFWEPTYEDCLNLIARLPAVASYVYRRIFKGGKTIAADNALDYAANFSHMLGFDDPKMLELMRLYITIHTDHEGGNVSAHTGHLVGSALSDPYLSFAAALNGLAGPLHGLANQEVLLWIKSVIGETGSDVTTDQLKEYVWKTLKSGKVVPGFGHGVLRKTDPRYTCQREFALKYLPEDPLFQLVSKLYEVVPPILTELGKVKNPWPNVDAHSGVLLNHFGLSEARYYTVLFGVSRSIGIGSQLIWDRALGLPLERPKSVTMEWLENHCKKVAA

SEQ ID NO: 541 - protein, 503 aa, Zea mays
MDRADPARGRLAVLSSHLRGAGAEEAAGLERSPVSAPAPGPRAGALAVVDGRTGKRHEVKVSEDGTVRATDFKKITTGKDDKGLKIYDPGYLNTAPVRSSICYIDGDEGILRYRGYPIEELAESSSFVEVAYLLMYGNLPTQSQLAGWEFAISQHSAVPQGLLDIIQSMPHDAHPMGVLASAMSTLSVFHPDANPALQGQDLYKSKQVRDKQIVRVLGKAPTIAAAAYLRLAGRPPVLPLNTLSYSENFLYMLDSLGDRTYKPNPRLARALDILFILHAEHEMNCSTAAVRHLASSGVDVFTALSGGVGALYGPLHGGANEAVLKMLNEIGSMENIPDFIVGVKNRKRKMSGFGHRVYKNYDPRAKVIRKLADEVFSIVGRDPLIEVAIALEKAALSDEYFIKRKLYPNVDFYSGLIYRAMGFPTEFFPVLFAIPRMGGWLAHWKESLDDPDTKIIRPQQVYTGFWLRHYTPVRERVLSSQSEELGQVATSNATRRRRAGSAL

SEQ ID NO: 542 - protein, 513 aa, Glycine max
MSKTTTSSEQTARNRLATLAAHLLPSDATSAAAILHPHRLSAPTGDLPPANLKGTLTVVDERTGKKYQIEVTPDGTVRASDFKKISSGKNDKGLKLYDPGYLNTAPVISRISYIDGDAGILRYRGYPIEDLAEKSTFTEVSYLILYGNLPSESQLAEWEFALSQHSAVPQGVLDMIESMPHDAHPMGMLVNAMSALSVFHPDANPALKGLDIYNSKQVRDKQIARVIGKITTIAAAINLRLAGRPPVLPSNKLSYTENFLYMLDSFGNRSYKPNPRLTRALDIIFVLHAEHEMNCSTSAVRHLSSSGVDVYTAIAGAVGALYGPLHGGANEAVLKMLSEIGTVENIPAFIEGVKARKRKLSGFGHRVYKNYDPRAKVLRKLTEEVFSIVGRDPLIEIAVALEKIALSDEYFIKRKLYPNVDFYSGLIYRAMGFQPEFFTVLFAIPRMAGYLAHWRESLDDPDTKIMRPQQVYVGEWLRHYAPINQRTASSNTDKLGQLAVSNASKRRLAGSGA

SEQ ID NO: 543 - protein, 339 aa, Oryza sativa
MARRSSSRACAAMATAAVFALLAATATASGLVRVEHPAKSDGSLSLLVVGDWGRKGTYNQSRVAEQMGKVGEKLNIDFVISTGDNFYEDGLTGVDDQAFEESFTDIYTAKSLQKPWYLVLGNHDYRGDVLAQLSPVLRKIDQRFICMRSFIVNAEIVDFFFIDTTPFQLKYWTRPKDHHYDWRGVAPRQKYITNLLKDMDEAMKKSTAKWKIAVGHHTIRSVSDHGDTKELLQLLLPVLKVNGIDFYINGHDHCLEHISSRDSPIQYFTSGGGSKAWRGVLQPNSDKLQFFYDGQGFMSLQINQDQADFIFYDVSGNILYKWSKSKANYLQPSTYITEA

SEQ ID NO: 544 - protein, 348 aa, Zea mays
MAPPAHDRLRRLVLLLVVATAAAALLLAPTTADAALPRVQHTPTKADGSLAILVVGDWGRRGQFNQTLVAQQMGVVGQKLDIDFVISTGDNIYDDGIANTSDPLFKESFSNIYTANSLQKPWYLVLGNHDYTGNALAQLDPAIRKVDSRYTAIAKSFIVNSGVADFFLVDTTPFIVHYWNNTKFDWRGVAPRDTYIANLLKDLKCALTASKAPWKIVVGHHPISSACGHGNNTELEELLLPVLRTHGVDMYLNGHDHCLQRVSSRDSRLQLLTSGGGSKAWAGKFKPTLDKVEFLYDGQGFMSMRLSRTEARLAFFDVAGSVLHCWTMHAQKLKTTTTTTAAAAAAGH

SEQ ID NO: 545 - protein, 256 aa, Oryza sativa
MKLAVVAVAALLLAAGVASADEFDFFYLVQQWPGSFCDTQAGCCFPDTGKPAAEFGIHGLWPNYAKCRPAAGAVADDDDGVVEMVVDGGAAVERHHRRRQKCWPEYCDDGNKLRPWEIKDLVAELDANWPTLSCKGGKSFEFWSYEWKKHGTCSGMGQHGYFAAALELKKRHDLAAVLAGAGIVPSDDESYSLGSIRDAIAAATGAVPNLECNRDAAGETQLFQVYQCVDRSGKKLVDCQLPMQGKCRDKVKLPTF

SEQ ID NO: 546 - protein, 278 aa, Zea mays
MTMATKAACVLAVWVLVASGLCDLGSARAPLGSKPQREFDYFALSLQWPGTICASTRHCCATNGCCRSEPLQTFTIHGLWPDYDDGTWPSCCRRTQFEMDKILPLKEVLDKYWPSLYCSKSGTCFSGKGLFWAHEWEKHGTCSAPVVQDELQYFTLALDLYSKYNVTEMLSSGGIQVSNGKEYALSDVIDTIKHAFGGSPQIVCKRGSIEELRLCFDKELKPRDCLTTSLANGSVSKSKHCPRYITLPTYDPLVLANSTVEIMTQFDEFDVPAALYTA

SEQ ID NO: 547 - protein, 252 aa, Zea mays
MASCRMALLLGLLLLVVASPAIADDDSGIYYQLALMWPGAYCEQTSAGCCKPTTGVSPARDFYITGFTVLNATTDAAVTGCSNKVPYDPNLITGIQGLNQYWSNIRCPSNNGQSSWKNAWKKAGACSGLSEKDYFETALSFRSRINPLVRLKAKGIEPDFGLYGLKAITKVFKSGINATPVIQCSKGPFDKYMLFQLYFCAAGNGTFIDCPAPQQYTCSKEILFHPFKKWMLKQQLNQDDDPFQLPGVAMDN

SEQ ID NO: 548 - protein, 229 aa, Zea mays; identical to SEQ ID NO: 533

SEQ ID NO: 549 - protein, 1131 aa, Sorghum bicolor
MSSSRPAHSSSSSSRTRQSSQARILAQTTLDAELNAEYEESGDSFDYSKLVEAQRSTPSEQQGRSGKVIAYLQHIQRGKLIQPFGCLLALDEKSFRVIAFSENAPEMLTTVSHAVPNVDDPPKLGIGTNVRSLFTDPGATALQKALGFADVSLLNPILVQCKTSGKPFYAIVHRATGCLVVDFEPVKPTEFPATAAGALQSYKLAAKAISKIQSLPGGSMEALCNTVVKEVFELTGYDRVMAYKFHEDEHGEVFAEITKPGIEPYLGLHYPATDIPQAARFLFMKNKVRMICDCRAKSVKIIEDEALSIDISLCGSTLRAPHSCHLQYMENMNSIASLVMAVVVNENEEDDEPGPEQPPQQQKKKRLWGLIVCHHESPRYVPFPLRYACEFLAQVFAVHVNKEFELEKQIREKSILRMQTMLSDMLFKEASPLSIVSGSPNIMDLVKCDGAALLYGDKVWRLQTAPTESQIRDIAFWLSEVHGDSTGLSTDSLQDAGYPGAASLGDMICGMAVAKITSKDILFWFRSHTAAEIKWGGAKHDPSDKDDNRRMHPRLSFKAFLEVVKMKSLPWSDYEMDAIHSLQLILRGTLNDALKPVQASGLDNQIGDLKLDGLAELQAVTSEMVRLMETATVPILAVDGNGLVNGWNQKVAELSGLRVDEAIGRHILTLVEDSSVSIVQRMLYLALQGKEEKEVRFELKTHGSKRDDGPVILVVNACASRDLHDHVVGVCFVAQDMTVHKLVMDKFTRVEGDYKAIIHNPNPLIPPIFGADQFGWCSEWNVAMTKLTGWHRDEVIDKMLLGEVFDSSNASCLLKSKDDFVRLCIIINSALAGEEAENAPFGLFDRNGKYIECLLSVNRKVNADGVVTGVFCFIHVPSDDLQHALHVQQASEQTAQRRLKAFSYMRHAINKPLSGMLYSRETLKSTGLNEEQMRQVHVADSCHRQLNKILADLDQDNITDKSSCLDLDMAEFVLEDVVVSAVSQVLIGCQGKGIRVACNLPERFMKQKVYGDGIRLQQILSDFLFVSVKFSPVGGSVDISSKLTKNSIGENLHLIDFELRIKHQGAGVPAEILSQMYEEDNKEPSEEGLSLLVSRNLLRLMNGNIRHIREAGMSTFILTAELAAAPSAVGQ

SEQ ID NO: 550 - protein, 1171 aa, Oryza sativa
MASGSRATPTRSPSSARPAAPRHQHHHSQSSGGSTSRAGGGGGGGGGGGGGAAAAESVSKAVAQYTLDARLHAVFEQSGASGRSFDYTQSLRASPTPSSEQQIAAYLSRIQRGGHIQPFGCTLAVADDSSFRLLAYSENTADLLDLSPHHSVPSLDSSAVPPPVSLGADARLLFAPSSAVLLERAFAAREISLLNPLWIHSRVSSNPFYAILHRIDVGVVIDLEPARTEDPALSIAGAVQSQKLVVRAISRLQALPGGDVKLLCDTVVEHVRELTGYDRVMVYRFHEDEHGEVVAESRRSNLEPYIGLHYPATDIPQASRFLFRQNRVRMIADCHAAPVRVIQDPALTQPLCLVGSTLRSPHGCHGQYMANMGSIASLVMAVIISSGGDDDHNIARGSIPSAMKLWGLVVCHHTSPRCIPFPLRYACEFLMQAFGLQLNMELQLAHQLSEKHILRTGTLLCDMLLRDSPTGIVTQSPSIMDLVKCDGAALYYHGKYYPLGVTPTEVQIKDIIEWLTMCHGDSTGLSTDSLADAGYSGAADLGDAVSGMAVAYITPSDYLFWFRSHTAKEIKWGGAKHHPEDKDDGQRMHPRSSFKAFLEVVKSRSLPWENAEMDAIHSLQLILRDSFRDSAEGTSNSKAIVNGQVQLGELELRGIDELSSVAREMVRLIETATVPIFAVDTDGCINGWNAKVAELTGLSVEEAMGKSLVNDLIFKESEETVNKLLSRALRGDEDKNVEIKLKTFGPEQSKGPIFVIVNACSTRDYTKNIVGVCFVGQDVTGQKVVMDKFINIQGDYKAIVHNPNPLIPPIFASDENTCCSEWNTAMEKLTGWSRGEVVGKLLVGEVFGNCCRLKGPDALTKFMIVLHNAIGGQDCEKFPFSFFDKNGKYVQALLTANTRSRMDGEAIGAFCFLQIASPELQQAFEIQRHHEKKCYARMKELAYIYQEIKNPLNGIRFTNSLLEMTDLKDDQRQFLETSTACEKQMSKIVKDASLQSIEDGSLVLEKGEFSLGSVMNAVVSQVMIQLRERDLQLIRDIPDEIKEASAYGDQYRIQQVLCDFLLSMVRFAPAENGWVEIQVRPNIKQNSDGTDTMLFPFRFACPGEGLPPEIVQDMFSNSRWTTQEGIGLSICRKILKLMGGEVQYIRESERSFFHIVLELPQPQQAASRGTS

SEQ ID NO: 551 - protein, 1178 aa, Sorghum bicolor
MASGSRATPTRSPSSARPEAPRHAHHHHHHHSQSSGGSTSRAGGGGGGGGGGGGTAATATATATESVSKAVAQYTLDARLHAVFEQSGASGRSFDYSQSLRAPPTPSSEQQIAAYLSRIQRGGHIQPFGCTLAVADDSSFRLLAFSENAADLLDLSPHHSVPSLDSAAPPPVSLGADARLLFSPSSAVLLERAFAAREISLLNPLWIHSRVSSKPFYAILHRIDVGVVIDLEPARTEDPALSIAGAVQSQKLAVRAISRLQALPGGDIKLLCDTVVEHVRELTGYDRVMVYRFHEDEHGEVVAESRRDNLEPYLGLHYPATDIPQASRFLFRQNRVRMIADCHATPVRVIQDPGMSQPLCLVGSTLRAPHGCHAQYMANMGSIASLVMAVIISSGGDDEQTGRGGISSAMKLWGLVVCHHTSPRCIPFPLRYACEFLMQAFGLQLNMELQLAHQLSEKHILRTQTLLCDMLLRDSPTGIVTQSPSIMDLVKCDGAALYYHGKYYPLGVTPTESQIKDIIEWLTVCHGDSTGLSTDSLADAGYLGAAALGDAVCGMAVAYITPSDYLFWFRSHTAKEIKWGGAKHHPEDKDDGQRMHPRSSFKAFLEVVKSRSLPWENAEMDAIHSLQLILRDSFRDAAEGTSNSKAIVNGQVQLGELELRGINELSSVAREMVRLIETATVPIFAVDTDGCINGWNAKIAELTGLSVEEAMGKSLVNDLIFKESEEIVEKLLSRALRGEEDKNVEIKLKTFGSEQSNGAIFVIVNACSSRDYTQNIVGVCFVGQDVTGQKVVMDKFINIQGDYKAIVHNPNPLIPPIFASDENTSCSEWNTAMEKLTGWSRGEVVGKFLIGEVFGSFCRLKGPDALTKFMVVIHNAIGGQDYEKFPFSFFDKNGKYVQALLTANTRSKMDGKSIGAFCFLQIASAEIQQAFEIQRQQEKKCYARMKELAYICQEIKNPLSGIRFTNSLLQMTDLNDDQRQFLETCSACEEQMSKIVKDATLQSIEDGSLVLEKSEFSFGDVMNAVVSQAMLLLRERDLQLIRDIPDEIKDASAYGDQFRIQQVLADFLLSMVRSAPSENGWVEIQVRPNVKQNSDGTDTELFIFRFTYPGEGLPADIVQDMFSNSQWSTQEGVGLSTCRKILKLMGGEVQYIRESERSFFLIVLELPQPRPAADREIS

SEQ ID NO: 552 - protein, 1137 aa, Oryza sativa
MSSSRSNNRATCSRSSSARSKHSARVVAQTPMDAQLHAEFEGSQRHFDYSSSVGAANRSGATTSNVSAYLQNMQRGRFVQPFGCLLAVHPETFALLAYSENAAEMLDLTPHAVPTIDQREALAVGTDVRTLFRSHSFVALQKAATFGDVNLLNPILVHARTSGKPFYAIMHRIDVGLVIDLEPVNPVDLPVTATGAIKSYKLAARAIARLQSLPSGNLSLLCDVLVREVSELTGYDRVMAYKFHEDEHGEVIAECKRSDLEPYLGLHYPATDIPQASRFLFMKNKVRMICDCSATPVKIIQDDSLTQPISICGSTLRAPHGCHAQYMASMGSVASLVMSVTINEDEDDDGDTGSDQQPKGRKLWGLMVCHHTSPRFVPFPLRYACEFLLQVFGIQINKEVELAAQAKERHILRTQTLLCDMLLRDAPVGIFTQSPNVMDLVKCDGAALYYQNQLWVLGSTPSEAEIKNIVAWLQEYHDGSTGLSTDSLVEAGYPGAAALGDVVCGMAAIKISSKDFIFWFRSHTAKEIKWGGAKHEPIDADDNGRKMHPRSSFKAFLEVVKWRSVPWEDVEMDAIHSLQLILRGSLQDEDANKNNNAKSIVTAPSDDMKKIQGLLELRTVTNEMVRLIETATAPILAVDITGSINGWNNKAAELTGLPVMEAIGKPLVDLVIDDSVEVVKQILNSALQGIEEQNLQIKLKTFNHQENNGPVILMVNACCSRDLSEKVVGVCFVAQDMTGQNIIMDKYTRIQGDYVAIVKNPSELIPPIFMINDLGSCLEWNEAMQKITGIKREDAVDKLLIGEVFTHHEYGCRVKDHGTLTKLSILMNTVISGQDPEKLLFGFFNTDGKYIESLMTATKRTDAEGKITGALCFLHVASPELQHALQVQKMSEQAAMNSFKELTYIRQELRNPLNGMQFTRNLLEPSDLTEEQRKLLASNVLCQEQLKKILHDTDLESIEQCYTEMSTVDFNLEEALNTVLMQAMPQSKEKQISIDRDWPAEVSCMHLCGDNLRLQQVLADFLACTLQFTQPAEGPIVLQVIPRMENIGSGMQIAHLEFRLVHPAPGVPEALIQEMFRHSPGASREGLGLYISQKLVKTMSGTVQYLREAESSSFIVLVEFPVAQLSTKRCKASTSKF

SEQ ID NO: 553 - protein, 1135 aa, Sorghum bicolor
MSSPLNNRGTCSRSSSARSRHSARVVAQTPVDAQLHAEFESSQRNFDYSSSVSAAIRPSVSTSTVSTYHQTMQRGLYIQPFGCLLAVHPDTFTLLAYSENAPEMLDLTPHAVPTIDQRDALAVGADVRTLFRSQSSVALHKAATFGEVNLLNPILVHARTSGKPFYAILHRIDVGLVIDLEPVNPVDVPVTAAGALKSYKLAAKAISRLQSLPSGNLSLLCDVLVREVSELTGYDRVMAYKFHEDEHGEVISECRRSDLEPYLGLHYPATDIPQASRFLFMKNKVRMICDCSATLVKIIQDDSLAQPLSLCGSTLRASHGCHAQYMANMGSVASLVMSVTISNDEEEDVDTGSDQQPKGRKLWGLVVCHHTSPRFVPFPLRYACEFLLQVFGIQLNKEVELAAQAKERHILRTQTLLWDMLLRDAPVGIFTQSPNVMDLVKCDGVALYYQNQLLLLGSTPSESEIKSIATWLQENHDGSTGLSTDSLVEAGYPGAAALREVVCGMAAIKISSKDFIFWFRSHTTKEIKWGGAKHEPVDADDNGRKMHPRSSFKAFLEVVKWRSVPWEDVEMDAIHSLQLILRGSLQDEDANRNNVRSIVKAPPDDTKKIQGLLELRTVTNEMVRLIETATAPVLAVDIAGNINGWNNKAAELTGLPVMEAIGRPLIDLVVVDSIEVVKRILDSALQGIEEQNLEIKLKAFHEQECNGPIILMVNSCCSRDLSEKVIGVCFVGQDLTTQKMIMDKYTRIQGDYVAIVKNPSELIPPIFMINDLGSCLEWNKAMQKITGIQREDVIDKLLIGEVFTLHDYGCRVKDHATLTKLSILMNAVISGQDPEKLLFGFFDTDGKYIESLLTVNKRINAEGKITGAICFLHVASPELQHALQVQKMSEQAATNSFKELTYIHQELRNPLNGMQFTCNLLEPSELTEEQRKLLSSNILCQDQLKKILHDTDLESIEQCYMEMNTVEFNLEEALNTVLMQGIPLGKEKRISIERDWPVEISRMYLYGDNLRLQQVLADYLACALQFTQPAEGPIVLQVIPKKENIGSGMQIAHLEFRIVHPAPGVPEALIQEMFRHNPEVSREGLGLYICQKLVKTMSGTVQYLREADTSSFIILIEFPVAQLSSKRSKPSTSKF

SEQ ID NO: 554 - protein, 213 aa, Oryza sativa
MATEEDASTMAAAEADPKPAATPSYPEMILAAIEALDDRNGSNKTAISQHIEGKYEGLLPPAHPSLLTAHLARMKQTGELAFSKNNYFRGDDPSLPPKRGRGRPPKPKDAAAAAAAPAPAPAAPAASSPRPRGRPPKPKDPLAEAVAKATSGMPRARGRPPKKAKVEQEDPIGAPAAASAPAAAAEAAPPVKRGRGRPPKVRPAAPVGEPAAA

SEQ ID NO: 555 - protein, 737 aa, Oryza sativa
MQQHQGGGSQYGAVPPDMGPFSPTHHASAPAPLPLSTATAAALSQPPPPQQQQQQPRTSYDELAAATSAGAGGFPDDDMLGDAGGSGGGGGSGAAGNRWPREETLALIRIRSEMDATFRDATLKGPLWEEVSRKLAELGYKRSAKKCKEKFENVHKYYKRTKEGRAGRQDGKSYRFFTELEALHAAAPQTPQPQQQQQQQLPPVTSSAPAMHAFAPPVPAPPPMSAMPPPPGPIQPAPISSAAPAVPLELPPQPPINLQGLSFSSMSGSESDDESEDDEMTAETGGSQDRLGKRKQAPAAKGWRLSSRGSSSKSSTGRRRCSGGFWRLWRSERRTHGREEAWRRQEVARLNREQEQLAQERAAAASRDAAIISFLQRIGGQSVQVPPAATVIQMPTPVQLQTPPPVKQPARQHQPQPTPPPPQAAPIPAAPLQQQPPQPQHKETIHHEAVTPRRAPPTSGSSLELVPAAEQHVESGLGGGEGGSASSSRWPKTEVQALIQLRMELDMRYQETGPKGPLWEEISSGMRRLGYNRSSKRCKEKWENINKYFKKVKESNKKRPEDSKTCPYFHQLDVIYRRKHLTGGGGGGASAANVAATAIEHQNPNRHEIEGKNINDNDKRKNGGGGGAQVPTSNGDTAPTTATFDVDSGMKKPEDIVRELSEQPPREFTTDETDSDDMGDDYTDDGEEGEDDGKMQYRIQFQRPNPGGANTAPPPATTPASAVPTSTPTSTFLAMVQ

SEQ ID NO: 556 - protein, 328 aa, Synechocystis PCC6803
MSENFAVATPVRVGIVGTGYAAQRRAEVFRGDRRSQLVSFWGNSEANTAKFADTFGVRPQQSWQALINDPEIDLVLIATINQLHGAIAEAALQAGKHVVLEYPLALTYAMGKKLQQLAREKGKLLHVEHIELLGGVHQAIRQNLGKIGEVFYARYSTIMGQNPAPQRWTYHHQQFGFPLVAALSRISRFTDLFGTVQQVDAQCRFWDQPNPEYFRACLATAYLQFNNGLKAEVIYGKGEVFHQNERIFTLHGDRGTLIFVGETGRLIQGQTETEITVGSRRGLFRQDTEAVLDYLTTGKPLYVDLEASLYALEVADLCAQACGYKVEN

SEQ ID NO: 557 - protein, 1128 aa, Oryza sativa
MSSSRPTQCSSSSSRTRQSSRARILAQTTLDAELNAEYEEYGDSFDYSKLVEAQRTTGPEQQARSEKVIAYLHHIQRAKLIQPFGCLLALDEKTFNVIALSENAPEMLTTVSHAVPSVDDPPKLRIGTNVRSLFTDPGTTALQKALGFADVSLLNPILVQCKTSGKPFYAIVHRATGCLVVDFEPVKPTEFPATAAGALQSYKLAAKAISKIQSLPGGSMEVLCNTVVKELFDLTGYDRVMAYKFHEDDHGEVFAEITKPGLEPYLGLHYPATDIPQAARFLFMKNKVRMICDCRARSIKIIEDESLHLDISLCGSTLRAPHSCHLQYMENMNSIASLVMAVVVNENEDDDEVGADQPAQQQKRKKLWGLLVCHHESPRYVPFPLRYACEFLAQVFAVHVNKEFELERQVREKSILRMQTMLSDMLLRESSPLSIVSGTPNIMDLVKCDGAALLYGGKVWRLQNAPTESQIRDIAFWLSDVHRDSTGLSTDSLHDAGYPGAAALGDMICGMAVAKINSKDILFWFRSHTAAEIRWGGAKHDPSDKDDSRRMHPRLSFKAFLEVVKMKSLPWNDYEMDAIHSLQLILRGTLNDDIKPTRAASLDNQVGDLKLDGLAELQAVTSEMVRLMETATVPILAVDSNGLVNGWNQKVAELTGLRVDEAIGRHILTVVEESSVPVVQRMLYLALQGKEEKEVKFEVKTHGSKRDDGPVILVVNACASRDLHDHVVGVCFVAQDMTVHKLVMDKFTRVEGDYKAIIHNPSPLIPPIFGADEFGWCSEWNAAMTKLTGWHRDEVINKMLLGEVFDSTNASCLVKNKDAFVSLCILINSALAGDETEKAPFSFFDRNGKYIECLLSVNRKVNADGVITGVFCFIQVPSHELQHALHVQQASQQNALTKLKAYSYMRHAINNPLSGMLYSRKALKNTGLNEEQMKEVNVADSCHRQLNKILSDLDQDSVMNKSSCLDLEMVEFVLQDVFVAAVSQVLITCQGKGIRVSCNLPERYMKQTVYGDGVRLQQILSDFLFVSVKFSPVGGSVEISCSLTKNSIGENLHLIDLELRIKHQGKGVPADLLSQMYEDDNKEQSDEGMSLAVSRNLLRLMNGDVRHMREAGMSTFILSVELASAPAK

SEQ ID NO: 558 - protein, 222 aa, Zea mays
METMSALARTAPPLAGTIRRPSCALRPTASLSFAAASTTPRGRLGLGLSTAPAGSGRAARARAVPRRIVASSEVEQSYIMIKPDGVQRGLVGEIISRFEKKGFLLKGLKLFQCPKDLAQEHYKDLKDKPFFPKLIDYITSGPVVCMAWEGDGVVASARKLIGATNPLQAEPGTIRGDLAVQTGRNVVHGSDSPDNGKREIELWFKEGEVCQWESVQAPWLIE

SEQ ID NO: 559 - protein, 238 aa, Zea mays
MSAASKKLFQAARSLVLSASNRSVLAAEGRTAALATLTNFGRKTLPTAYLSYHKQGSHHAASGWGAIAAAVPAAVYMLQDQEAHAAEMERTFIAIKPDGVQRGLISEIMSRFERKGYKLVAIKLIVPSKEFAEKHYHDLKERPFFSGLCDFLSSGPVLAMVWEGEGVIKYGRKLIGATDPQKSEPGTIRGDLAIVVGRNIIHGSDGPETAKDEIALWFEPKELVSYTSNAEKWIYGVN

SEQ ID NO: 560 - protein, 149 aa, Zea mays
MESTFIMIKPDGVQRGLIGEIISRFEKKGFYLKALKLVNVERSFAEKHYAGSRLQALLPGLVDYIISGPVVAMVWEGKSVVTTGRKIIGATNPLASEPGTIRGDFAVDIGRNVIHGSDSIESANKEIALWFPEGPADWQSSQHPWIYEK

SEQ ID NO: 561 - protein, 149 aa, Zea mays
MEQTFIMIKPDGVQRGLIGDIISRFEKKGFYLKGMKFMNVERSFAQQHYADLSDKPFFPGLVEYIISGPVVAMVWEGKDVVLTGRRIIGATRPWEAAPGTIRGDYAVEVGRNVIHGSDSVENGKKEIALWFPEGVAQWKSNLHPWIYEA

SEQ ID NO: 562 - protein, 625 aa, Oryza sativa
MKREYQEAGGSSGGGSSADMGSCKDKVMAGAAGEEEDVDELLAALGYKVRSSDMADVAQKLEQLEMAMGMGGVSAPGAADDGFVSHLATDTVHYNPSDLSSWVESMLSELNAPLPPIPPAPPAARHASTSSTVTGGGGSGFFELPAAADSSSSTYALRPISLPVVATADPSAADSARDTKRMRTGGGSTSSSSSSSSSLGGGASRGSVVEAAPPATQGAAAANAPAVPVVVVDTQEAGIRLVHALLACAEAVQQENFAAAEALVKQIPTLAASQGGAMRKVAAYFGEALARRVYRFRPADSTLLDAAFADLLHAHFYESCPYLKFAHFTANQAILEAFAGCHRVHVVDFGIKQGMQWPALLQALALRPGGPPSFRLTGVGPPQPDETDALQQVGWKLAQFAHTIRVDFQYRGLVAATLADLEPFMLQPEGEADANEEPEVIAVNSVFELHRLLAQPGALEKVLGTVHAVRPRIVTVVEQEANHNSGSFLDRFTESLHYYSTMFDSLEGGSSGQAELSPPAAGGGGGTDQVMSEVYLGRQICNVVACEGAERTERHETLGQWRNRLGRAGFEPVHLGSNAYKQASTLLALFAGGDGYRVEEKEGCLTLGWHTRPLIATSAWRVAAA

SEQ ID NO: 563 - protein, 178 aa, Zea mays
MAGATTPASGALVRLCLPSLLLFLYRCEAVEMERTLAMIKPDGLSGKYTEAIKEVILDSGFHIVKETEVQLDAERASVFYAEHSQRSFFDSLVKYITSGPVLAMVLERPDAVAQWRTLIGPTDAKKAKTSHPNSIRAMCGLDSEKNCVHGSDSPESADREISFFFGEAESVTVEHDEL

SEQ ID NO: 564 - protein, 752 aa, Zea mays
MDSSGEELLKKIRELEVGQAQLKQEMSKLIPGAGERRRSQSVSPRRGVPVPPPPPAKAKAGAPGRRLSGGFEGGQRAWARGSASFPHSSPLQREGRAGAGDASTSARLPERQYSRVLQSMGQSVHILDLDGRIIYWNQSAENLFGYPASEALGQDALMLLVDSHDHNAVNNIFQRISMGESWTGKFPVKNKQGHRFSAVATNTPFYDEDGSLMGFICVSSDSRQLEQIFCKPPTSARSQSESSMTSCDGSCSNTSHRINSLNRSSFDSNLPLQSTLASKITNLATKVTNKVRSRVRTDENDDGGSGESHCLDRGAKEEPTSSGTSTPRGDAPHGPFATEENSPGKSTNPNSDESEGKVGLHKILGSKAEALLNKKGISWPWKGRENEGPDERNHVILPWLHGGQENGVNHQKVSDSSISPDAQGAEHNQPSKNEASGSWSSFNNNSTGSASSTGSTNSSALYKVDHEADCLDYEILWEDLVIGEQIGQGSCGTVYHALWYGSDVAVKVFSKQEYSEEVILTFRQEVSLMKKLRHPNILLFMGAVMSPQRLCIVSEFLPRGSLFRLLQRSATKLDVRRRVHMALDIVRGMNYLHHSSPPIIHRDLKSSNLLVDKNWIVKVADFGLSRLKRETFLTTKTGKGTPQWMAPEVLRNEPSDEKSDVYSYGVILWELVTQKIPWENLNSMQVIGAVGFMNQRLDIPSEVDPQWKSIILSCWESDPQQRPSFQELLERLRELQRHYAIQHRNTKNSIEE

SEQ ID NO: 565 - protein, 170 aa, Zea mays
MAPQGRRATRRYGGVPEMGGASASASSGAGADERPKGEDGKQGQVAAGAQPPAGGKKRGRTAGDKEQNRLKRLLRNHVSAQQARERKKAYLTELEAKAKGLELRNAELEQRVSTLQNENNTLRQVIDVSGKEFKFTWASGRGELCDIYEERQSGEDGNGLLLECGSTWRK

SEQ ID NO: 566 - protein, 545 aa, Zea mays
MPIKFALENMSTQASNRSYRYPDRTQLPYHNGNPMHVGGNGNYCVQQNHDDVNYISSDDGSQSSSSRVQDFQAQFCTLDSSSANCVYPAHSSTSSQSISGSPLSQQESHSDHAYGSSPSASCITQVPTWTLKDLENVMLGPDSDIGSPDSSFLLDTALHGNNWRELLGIQTGDLRQVIVACGKAVDENAVYMDALMSELREMVSVSGEPMQRLGAYMLEGLIARLSFTGHALYKSLKCKEPVATSSELLSYMHLLYEICPFFKFGYMSANGAIAEAVKGEDIIHIIDFQIAQGSQWMTMIQALASRPGRRPYLRITGIDDSNSAHARGGGLDMVGQRLHRMAQSCGLPFEFNAVPAASHEVVFEDLCLRSGEAIVVNFAYQLHHTPDESVGIENHRDRILRMVKSLSPKVVTLVEQEANTNTAPFFLRYMETLDYYTAMFEAIDVACPRDDKKRISTEQHCVARDIVNLIACEGAERIERHEPFGKWRARLVMAGFRPYPLSPVVNRTIKTLLDSYHSHYRLEERDGILYLGWKNRKLVVSSAWC

SEQ ID NO: 567 - protein, 594 aa, Zea mays
MDTLFRLVSLQASEQQQQQQSASYNSRSTTSSGSRSSSHQTNASYNYYYHSNSSGGGGGGQYYYGQQHPQQHQHQQYYLEPYQQEECGNTHHLYMDEDFSSSSSSRQHFHSHGAVVQPPTSSTATPTAPTPSLSTSSTAAGAAHALFEAADLSFPPDLNLDFSSPASSSGGGAASSAAVGGGGGGRWASQLLLECARAVAGRDSQRVQQLMWMLNELASPYGDVEQKLASYFLQGLFARLTASGPRTLRTLAAASDRNTSFDSTRRTALRFQELSPWSSFGHVAANGAILESFLEAAAASPEPQRLHILDLSNTFCTQWPTLLEALATRSADDTPHLSITTVVSSAPSAPTAAVQRVMREIGQRMEKFARLMGVPFSFRAVHHAGDLAGLDLDALDLRDGGATTALAINCVNSLRGVVPGGARRRDAFAASLRRLDPRVVTVVEEEADLVAFDPGAPEESGDTEAAFLKVFGEGLRFFSAYMDSLEESFPKTSNERLALERGAGRAIVDLVSCPASESMERRETAASWARRMRSSGFSPVAFSEDVADDVRSLLRRYREGWSMRDAGLDDSAAGAGVFLAWKEQPLVWASAWRP

SEQ ID NO: 568 - protein, 542 aa, Zea mays
MSARDSNHSYKCSDDSQMPYYNNSAPVGENGRIHMAENSLGHHYSSSDIGSQRINNSNPQVFEAQYCTLESSSANGVYPAQSSTSSHSISPLSGSPLSQHDSHSDHTYSSPPSASCLTEVAGLLIKQKELENSIVGPGLDISSDCSRSLLQAHVPVRPDNWRQLLGINGGDLMQVVIACGKAVAENDVFATELLISELGHLVSVSGDPMQRLGAYMLEGIVARLSSSGSMLYKSLKCKEPTSSELMSYMHLLYEICPFYKFGYMSANGAIAEAIKGENFVHIIDFQIAQGSQWVTLLQALAARPGGPPYIRITGIDDSNSAYARGGGLDIVGRTLCDVANSCGLPFEFNAVPAASHEVELQHLAIRHGEIIAVNFAYQLHHVPDESVSTENHRDRIIRMIKSINPRVVTLVEQESNTNTAPFFPRYMETLNYYTAMFESIDVALPRDDRRRMSAEQHCVARDIVNLIACEGAERVERHELFGKWKSRFAMAGFRPYPLSSVVNNTINTLLHTYNSYYRLEERDGVLYLGWKNRVLVVSSAWC

SEQ ID NO: 569 - protein, 630 aa, Zea mays
MKREYQDAGGSGGDMGSSKDKMMAAAAGAGEQEEEDVDELLAALGYKVRSSDMADVAQKLEQLEMAMGMGGVGGAGATADDGFVSHLATDTVHYNPSDLSSWVESMLSELNAPPAPLPPATPAPRLASTSSTVTSGAAAGAGYFDLPPAVDSSSSTYALKPIPSPVAAPSADPSTDSAREPKRMRTGGGSTSSSSSSSSSMDGGRTRSSVVEAAPPATQASAAANGPAVPVVVVDTQEAGIRLVHALLACAEAVQQENFSAAEALVKQIPMLASSQGGAMRKVAAYFGEALARRVYRFRPPPDSSLLDAAFADLLHAHFYESCPYLKFAHFTANQAILEASAGCRRVHVVDFGIKQGMQWPALLQALALRPGGPPSFRLTGVGPPQPDETDALQQVGWKLAQFAHTIRVDFQYRGLVAATLADLEPFMLQPEGDDTDDEPEVIAVNSVFELHRLLAQPGALEKVLGTVRAVRPRIVTVVEQEANHNSGTFLDRFTESLHYYSTMFDSLEGAGAGSGQSTDASPAAAGGTDQVMSEVYLGRQICNVVACEGAERTERHETLGQWRSRLGGSGFAPVHLGSNAYKQASTLLALFAGGDGYRVEEKDGCLTLGWHTRPLIATSAWRVAAAAAP

SEQ ID NO: 570 - protein, 561 aa, Zea mays
MSFVRQADPSVSCAETTYIHKFVPPGPVFPAQRFVSGTDLLHHGPQPYNAEGYKQSGFNGTAPHAFQSFYNTDSYAESHFNEAPYSPAIFDISQQNSQSLSDNQASDLVEFDEDEMRVKLQELEHALLDDGDEIFFDLSGSINDEWNDNIKTNNEWVNTMKNIVSPDSPKEASPESSICCLDNNVGEARNPKQLLFDCAEAISENSIDEAQSIIAELRQKVAIQGEPSQRLAAYLVEGLAATLQSSGKGIYRALRCKEAPTLYQLSAMQILFEICPCFRLGFMAANYAILEACKGEDVVHIIDFDINQGSQYITLIQFLKNNSNKPRLLRITGVDDPESVHRAVGGLNVVGQRLEKLAEDCEVRFEFRAVAANIEDLTPGMLGRRPGEALIVNFAFLLHHLPDESVSIMNQRDRLLRMVKGLRPKLVTLVEQDANTNTTPFPSRFREVYDYYSALFDSLDATLPRESPDRMNVERQCLAREIVNILACEGPDRVERYEVAGKWRARMAMAGFVSSPFNSGAIDGIRSLLKSYCDKYRFEKVQDGLHFGWGDKTLVFSSAWQ

SEQ ID NO: 571 - protein, 185 aa, Zea mays
MEDGSAPRRSTPPARRSRSAEFHNFSERRRRDKINEKLKALQELLPNCNKTDKVSMLDEAIDYLKSLQLQLQMLVMGKGMSPVVPLELQQYMHYITADPAQLPPLRPSGQQHRQFQITQANPQRQSNVESDFLSQMQNLHSSEPPQNFLRPPKLQLYTPEQRGGLPSTSHNTGWISGSSSYNFME

SEQ ID NO: 572 - protein, 554 aa, Zea mays
MADTPTSRMVHPFGDVPRQTPKQFLYSGNPQHLCHPYQSAPDTHVVPQRCYTVRSQSHSPNNAGSQDHETHKQYTLESSAASGCSRHGSPSSQSVHAGSGSPVSHDDSHSGSTNGHGSPVSASCVTGEDPTDLKQKLKDLEAVMLGTSETDPEIVNSLEISAANQLSLEPEEWEHMVSMPRGNLKELLIACARAVERNNSYAIDLMIPELRKMVSVSGEPLERLGAYMVEGLVARLAASGSSIYKALKCKEPRSSDLLSYMHFLYEACPYFKFGYMSANGAIAEAIKGEDRIHIIDFHIAQGAQWVSLLQALAARPGGPPFVRVTGIDDSVSAYARGGGLELVGRRLTHIAGLYKVPFQFDAVAISGSEVEEEHLGVVPGEAVAVNFTLELHHIPDETVSTANHRDRILRLVKGLSPKVLTLVEQESNTNTAPFAQRFAETLDYYTAIFESIDLALPRDDRERINIEQHCLAREIVNLVACEGEERVERHEVFGKWKARLMMAGFSPSPLSALVNATIKTLLQSYSPDYKLAERDGVLYLGWKNRPLIVSSAWH

SEQ ID NO: 573 - protein, 570 aa, Zea mays
MDLHQLLKYRLTGANVYYEFPTENNLANTPWPASPLKSEFSSSSYTPLSSQLECDNLSALSNTPDNQSSTETISAQPISPLEVDSSFKQAAILRENTQVRPDPLYTTSRHNMQHALREIETVLMAPDADDAATSTKHEIEEHKPAQLMRQRSRTWSHESRQPSPGVVRTQLASGYPTASYEFRPEKRLRELREDPQSMVKQLLTKCAEALSEERIEEFLNLVQQARGVVSITGEPIQRLGAYLLEGLVARHANSGTNIYRALKCREPESNELLSYMKILYNICPYSKFGYMAANGAIAEALRNEDRIHIIDFQIAQGTQWITLIQALAARPGGPPHVRITGIDDPVSEYARGEGLDLVGKMLKSMSEEFRIPLEFTPLPGIYATQVTKEMLDIRSGEALAVNFTLQLHHTPDESVDVNNPRDGLLRMVKGLSPKVTTLVEQESHTNTTPFLMRFTETLDYYSAMFESIDTNLPRDNKERINVEQHCLAKDIVNIIACEGKDRVERHELLGKWRSRLTMAGFRPYPLSSYVNSVIRKLLACYSDKYTLEEKDGAMLLGWKNRKLISASAWH

SEQ ID NO: 574 - protein, 971 aa, Zea mays
MARRTSYLASRENAALSYGDIASSRAGDASSRENLATSLANNIISRNNDVSGNEAPTSRVGYVNNEFKTPFHSQQILLSPWSNQDNALKVSSFSNRILDQMRSKTVAPPSGVLGSPLKSKSKGKGVAYQRAREEIRVQANARPRDPLDKIPTIPTSIHDSVARVDMLFSTSGDVSKSHSEGTSLRELIKPGRQTMSKFEKLHLFKQILDLVDNCHAQGFTLQHLRPSYFTILSSNQVKYIGSYTTQDLPTSIKQEFAREDLVSRKRAFGHRIDYQDSNGHGNLMLKHQKVGEQGLVAVRRLANTFLTDKIRDNQIEDNDPGISRQENFSYTTREHFKFVESYGSNMSSAQHVSSSGTQQPAFELRNIEESWYKSPEELSQFKGTPPSNIYSLGVLLFELFCCSETWEMHCAAMSNLRQRILPPNFLSESPKEAGFCLWLLHPDPCSRPKAKEILGCDLINEGRDLSLLDKSPVSISEDDTESSLLLNFLSQLKEEKEMQAAKLSAELGSLQTDITEIDRRHSAGMRLSLEDMDVLPSSSLPGASVSALQGALLSGLLPASCKSSIYEERVMRNLVQLENAYYSMRSSVDTCETNVIKRPDNEALRVRENFHQRHSDSDAKGEKTDRLGCFFDGLCKYARHNRFEVRGILKNADVLSSPNVICSLSFDRDEEYFAAAGVSKKIKIFEFDALLNDRVDIHYPLVEMPSKSKLSCVCWNSYIKNYLASTDYDGTVQLWDAGSGQGFTQFTEHRKRAWSVSFSQVDPTKLASGSDDCCVKVWSINQKNSIDTIRNVANVCCVQFSPYSSRMLAFGSADYKIYCYDLRNTRIPWCTISGHGKAVSYVRFLDPETLISASTDNTLKIWDLNQTNCSGLSADSCSLTLNGHSNEKNFVGLSVHDGYITCGSETNEVFSYYKDFPMPITSHRFGSIDPITGQVTNEDNQQFVSSVCWRGKSNMVVAANSSGSIKVLELV

SEQ ID NO: 575 - protein, 228 aa, Zea mays
MRGSGGRGTKRSRTAEVHNLSERRRRDRINEKMRALQELIPNCNKIDKASMLDEAIEYLKTLQLQVQMMAMGSGLCIPPMLLPRAMQLQIPSIAHFHHLGMGLGYGMGVLDMNSTAAVPFQPIPGAHYTCPMIPGTPPQGLGIGMPGTNTMPVFGVPGQAIHPSASSVQPFPSLAGLPVRPNLAPQVPAVMANMVQEQQQGVATQQQQSLNNEAQQKANTGDPQILQK

SEQ ID NO: 576 - protein, 285 aa, Glycine max
MTVEKEDLGLSLSLSFPQNPPTHLHLNLVSSSPSSHNPQKPSWNDPFTSSAGSSFLRGIDVNRLPSVVDCEEEAGVSSPNSTVSSVSGKRSEREEANGEENDTDRACSRGIISDEEDAETSRKKLRLSKDQSIILEESFKEHNTLNPKQKLALAKQLGLRARQVEVWFQNRRARTKLKQTEVDCEFLKRCCENLTVENRRLQKEVQELRALKLSPQFYMHMTPPTTLTMCPSCERVAVPPSSAVDPAMRHHHVPPTQPRAFPIGPWATAAATIPHRPFDALRRRS

SEQ ID NO: 577 - protein, 637 aa, Zea mays
MLGRAAALSAPRWRGGVPDLRAALRSGGNLLFALFVAAVLAFTLLAAFHSPDDPLLHPSSHQLTDFLTSATSTSTFLTDDSVLRTGEDFNSSSTGAAGEVAAGGVEVVAEAVPFIKLSEVGAEAEKTEPETERAVTVDTDAATGEGAAVAEETAVAEAVSCDTEAPVDCTGDRELFNLLMRAAIERFPDLHFYRFGRPVAVPGSPMECDLAWRFRPAADAIGTGRTTYYKDYRRFTLTRDVNTCSLVVDTVGEYHSGVGAKRNGRRKGKKGKKGKQDAPVTDFVPVKTQIRLDENTANNEAAGAAAEPVFVVGEAVNDSLPVVASESDFSRGKYLIYIGGGERCKSMNHFIWGFLCALGEAQFLNRTLVMDLNVCLNARYTSSGKDEERDFRLYFDFEHLKQSASVIDQSQFWQDWGQWHKKDRLKNFYTEDIRMTPMKLRDIKDTLIMRKFGNVEPDNYWSRVCEGETEGIIKRPWHFLWKSRRLMEIVSAIASRMNWDFDSVHVVRGEKAQNTQLWPNLDRDTSPDSLLMALNDKVGAGRYLYIATNEPDKSFFNPLKEKYKTHFLDDFKYLWDENSEWFTETKELSNGQPVEFDGYMRIAVDTEVFLRGKRHVETFNELTRDCKDGVNTCSASS

SEQ ID NO: 578 - protein, 593 aa, Glycine max
MAVDSEVPRAERSAKALQFIEEVTKNTDSVQERVLTEILTQNAETEYLKRFGLNGATDRDTFKSKVPVVTYEDLQPDIQRIANGDSSPILCSHPISEFLTSSGTSAGERKLMPTIHEEMDRRQLLYSLLMPVMNQYVSDLDKGKALHFLFIKAEAKTPGGLVARPVLTSYYKSEQFRKRPFDPYNVLTSPNEAILCPDSFQSMYTQMLCGLIMRHEVLRVGAVFASGLLRAIRFLQLNWEQLSHDILTGTLNPKITEPSIKERMSKILKPDPQLAAFIKNECSVENWERIIVRIWPNTKYLDVIVTGAMAQYIPTLDYYSGGLPKPCTMYASSECFFGLNLKPMSEPSDVSYTILPNMGYFEFLPHDDSSPVTLSKDSPPRLVELADVELGKYYELIITTYSGLCRYRVGDILQVTGFHNSDPQFRFVRRKNVLLSIDSDKTDEAELQKAIENASELLKEFNTSVVEYTSFADTKSIPGHYVIYWELMMKDSSHPPTNQVLNQCCLVMEESLNSVYRQGRVADNSIGPLEIRVVKNGTFEELMDYAISRGASINQYKVPRCVSFTPIMELLDSRVVSFHFSPAAPHWTPERRR

SEQ ID NO: 579 - protein, 2470 aa, Saccharomyces cerevisiae
MEPHEEQIWKSKLLKAANNDMDMDRNVPLAPNLNVNMNMKMNASRNGDEFGLTSSRFDGVVIGSNGDVNFKPILEKIFRELTSDYKEERKLASISLFDLLVSLEHELSIEEFQAVSNDINNKILELVHTKKTSTRVGAVLSIDTLISFYAYTERLPNETSRLAGYLRGLIPSNDVEVMRLAAKTLGKLAVPGGTYTSDFVEFEIKSCLEWLTASTEKNSFSSSKPDHAKHRALLIITALAENCPYLLYQYLNSILDNIWRALRDPHLVIRIDASITLAKCLSTLRNRDPQLTSQWVQRLATSCEYGFQVNTLECIHASLLVYKEILFLKDPFLNQVFDQMCLNCIAYENHKAKMIREKIYQIVPLLASFNPQLFAGKYLHQIMDNYLEILTNAPAKKIPHLKDDKPQILISIGDIAYEVGPDIAPYVKQILDYIEHDLQTKFKFRKKFENEIFYCIGRLAVPLGPVLGKLLNRNILDLMFKCPLSDYMQETFQILTERIPSLGPKINDELLNLVCSTLSGTPFIQPGSPMEIPSFSRERAREWRNKSILQKTGESNDDNNDIKIIIQAFRMLKNIKSRFSLVEFVRIVALSYIEHTDPRVRKLAALTSCEIYVKDNICKQTSLHSLNTVSEVLSKLLAITIADPLQDIRLEVLKNLNPCFDPQLAQPDNLRLLFIALHDESFNIQSVAMELVGRLSSVNPAYVIPSIRKILLELLTKLKFSTSSREKEETASLLCTLIRSSKDVAKPYIEPLLNVLLPKFQDTSSTVASTALRTIGELSVVGGEDMKIYLKDLFPLIIKTFQDQSNSFKREAALKALGQLAASSGYVIDPLLDYPELLGILVNILKTENSQNIRRQTVTLIGILGAIDPYRQKEREVTSTTDISTEQNAPPIDIALLMQGMSPSNDEYYTTVVIHCLLKILKDPSLSSYHTAVIQAIMHIFQTLGLKCVSFLDQIIPTILDVMRTCSQSLLEFYFQQLCSLIIIVRQHIRPHVDSIFQAIKDFSSVAKLQITLVSVIEAISKALEGEFKRLVPLTLTLFLVILENDKSSDKVLSRRVLRLLESFGPNLEGYSHLITPKIVQMAEFTSGNLQRSAIITIGKLAKDVDLFEMSSRIVHSLLRVLSSTTSDELSKVIMNTLSLLLIQMGTSFAIFIPVINEVLMKKHIQHTIYDDLTNRILNNDVLPTKILEANTTDYKPAEQMEAADAGVAKLPINQSVLKSAWNSSQQRTKEDWQEWSKRLSIQLLKESPSHALRACSNLASMYYPLAKELFNTAFACVWTELYSQYQEDLIESLCIALSSPLNPPEIHQTLLNLVEFMEHDDKALPIPTQSLGEYAERCHAYAKALHYKEIKFIKEPENSTIESLISINNQLNQTDAAIGILKHAQQHHSLQLKETWFEKLERWEDALHAYNEREKAGDTSVSVTLGKMRSLHALAEWEQLSQLAARKWKVSKLQTKKLIAPLAAGARGGSGEWDMLDEYISVMKPKSPDKEFFDAILYLHKNDYDNASKHILNARDLLVTEISALINESYNRAYSVIVRTQIITEFEEIIKYKQLPPNSEKKLHYQNLWTKRLLGCQKNVDLWQRVLRIRSLVIKPKQDLQIWIKFANLCRKSGRMRLANKALNMLLEGGTILVYQIRSKPPPPVVYAQLKYIWATGAYKEALNHLIGFTSRLAHDLGLDPNNMIAQSVKLSSASTAPYVEEYTKLLARCFLKQGEWRIATQPNWRNTNPDAILGSYLLATHFDKNWYKAWHNWALANFEVISMVQEETKLNGGKNDDDDDTAVNNDNVRIDGSILGSGSLTINGNRYPLELIQRHVVPAIKGFFHSISLLETSCLQDTLRLSTLLFNFGGIKEVSQAMYEGFNLMKIENWLEVLPQLISRIHQPDPTVSNSLLSLLSDLGKAHPQALVYPLTVAIKSESVSRQKAALSIIEKIRIHSPVLVNQAELVSHELIRVAVLWHELWYEGLEDASRQFFVEHNIEKMFSTLEPLHKHLGNEPQTLSEVSFQKSFGRDLNDAYEWLNNYKKSKDINNLNQAWDIYYNVFRKITRQIPQLQTLDLQHVSPQLLATHDLELAVPGTYFPGKPTIRIAKFEPLFSVISSKQRPRKFSIKGSDGKDYKYVLKGHEDIRQDSLVMQLFGLVNTLLKNDSECFKRHLDIQQYPAIPLSPKSGLLGWVPNSDTFHVLIREHRDAKKIPLNIEHWVMLQMAPDYENLTLLQKIEVFTYALDNTKGQDLYKILWLKSRSSETWLERRTTYTRSLAVMSMTGYILGLGDRHPSNLMLDRITGKVIHIDFGDCFEAAILREKYPEKVPFRLTRMLTYAMEVSGIEGSFRITCENVMRVLRDNKESLMAILEAFALDPLIHWGFDLPPQKLTEQTGIPLPLINPSELLRKGAITVEEAANMEAEQQNETRNARAMLVLRRITDKLTGNDIKRFNELDVPEQVDKLIQQATSIERLCQHYIGWCPFW

SEQ ID NO: 580 - protein, 259 aa, Glycine max
MSVEKERETQVYLAKLAEQAERYEEMVECMKKVAKLDLDLTVEERNLLSVGYKNVIGARRASWRIMSSIEQKEESKGNEHNVKLIKSYCQKVEEELSKICGDILTIIDQHLIPSSGSAEASVFYYKMKGDYFRYLAEFKTDQERKEAAEQSLKGYEAASATANTDLPSTHPIRLGLALNFSVFYYEIMNSPERACHLAKQAFDEAIAELDTLSEESYKDSTLIMQLLRDNLTLWTSDLPEDGGEDNIKAEEAKPSEPEH

SEQ ID NO: 581 - protein, 261 aa, Glycine max
MTASKDRENFVYIAKLAEQAERYEEMVESMKNVANLDVELTVEERNLLSVGYKNVIGARRASWRILSSIEQKEETKGNELNAKRIKEYRQKVELELSNICNDVMRVIDEHLIPSAAAGESTVFYYKMKGDYYRYLAEFKSGNEKKEAADQSMKAYESATAAAEADLPPTHPIRLGLALNFSVFYYEILNSPERACHLAKQAFDEAISELDTLNEESYKDSTLIMQLLRDNLTLWTSDIPEDGEDAQKVNGTAKLGGGEDAE

SEQ ID NO: 582 - protein, 262 aa, Glycine max
MAASAPTPREEFVYMAKLAEQAERYEEMVEFMEKVSASAESEELTVEERNLLSVAYKNVIGARRASWRIISSIEQKEESRGNEDHVAVIRDYRSKIEAELSNICDGILKLLDTRLVPSAASGDSKVFYLKMKGDYHRYLAEFKTGADRKEAAESTLSAYKAAQDIANTELPPTHPIRLGLALNFSVFYYEILNSPDRACSLAKQAFDEAIAELDTLGEESYKDSTLIMQLLRDNLTLWTSDMQDDGADEIKEAAPKGDGEQN

SEQ ID NO: 583 - protein, 709 aa, Oryza sativa
MPFSYAAAASGSASSSRKPVPVAAAAARRPAPSPAAAAAPAPSPSNPSAVSDSDPSSYSSSGEETDLTASDPAAASVISSYLSVAGDGADLSKVGIFLSSAARRRSPPCLICFDPIRPSDPVWSCSASCFALLHLHCIQSWAHQSSSAAPSPTWGCPKCRFPYPKSQTPTSYLCFCSKTVDPAPDPWILPHSCGDVCGRRLNADRDSGCEHNCLLLCHPGPCPPCPAIVPNAMCFCGSHRETRRCSHQRYSCSGKCNKRLGCGIHRCPVDCHDGPCPPCAVRGKHKCECGETMEERLCSERVFQCKRECGGMLQCGKHSCERGCHAGKCGGCPLQGRRTCPCGKKDYPSLDCDAEAATCGSTCEKVLGCGRHKCPERCHRGSCVETCRLVITKSCRCGGLKKEQVPCYQELTCERKCQRLRNCGRHACRRRCCEGDCAPCPEPHKCHYGACPPCKLICGEELSCGHRCKLRCHGPIAPPNPEFTLKPIKRKKGKHIDSTPGTPCPPCQEVVLVPCFGHHLGQERAILCSKRRQFPCQNLCENYRIVPICAQKYVTLVNVRCACNNLKKEWICQDVLKEYRQSGRDPKQIPKNQYAVGLLACGEDCVKKVKAADSELHLRKIQEIKTPAVEVENVPKRRKRRNRGQESVESSKFQEIKAVALKFLLVIFLCIIVVAGLYLLWKGVYRLSDWMNDMEEQRARQRHLKPGRL

SEQ ID NO: 584 - protein, 379 aa, Oryza sativa
MVEVEEVSNKMQVQMRLHPAAAAEEEDADLPLPALFDKASHLHSLASSSSLDQEGIRKGVDLLRRCDEMVSKVGLFSSNETKDDISTANLKYLLVPYYLGEMTERVAQEDRIPVLKASQDHLKEFISICEALELISEDELEISRQKNLIPWQIEEHRRLHGSSAKRLQKQSSRIKERKERRRRHESSCLSAPIELGGDLLRMMEKEREGMVSYYLIGSIEGFDLLDMLKKEEEIVPAVKEGKRRMVMHLLVKCLMNVQKGLKHGTIMLPTVHHTPNQLIQSLVQLTSERERMAAQVFQPSYRLPTMSIEEAGLREMKMMEKWQERTAKMIQESNSAWHKDGSRSAQEDEDAEEEKARGWDDWKDDNPRGAGNKKLTPCG

SEQ ID NO: 585 - protein, 227 aa, Oryza sativa
MAEEHETRPPSAGRPPSSGRGRADDADEREEGEIADDDSGHAPPQANPAAPHPLEHAWTFWFDNPQGKSKQATWGSSIRPIHTFSTVEDFWSLYNNIHHPSKLVVGADFHCFKNKIEPKWEDPICANGGKWTFSCGRGKSDTMWLHTLLAMIGEQFDYGDEICGAVVSVRGKQERIAIWTKNAANEAAQISIGKQWKEFLDYKDSIGFIVHDDAKKMDKGLKNRYTV

SEQ ID NO: 586 - protein, 267 aa, Saccharomyces cerevisiae
MSTSREDSVYLAKLAEQAERYEEMVENMKTVASSGQELSVEERNLLSVAYKNVIGARRASWRIVSSIEQKEESKEKSEHQVELICSYRSKIETELTKISDDILSVLDSHLIPSATTGESKVFYYKMKGDYHRYLAEFSSGDAREKATNASLEAYKTASEIATTELPPTHPIRLGLALNFSVFYYEIQNSPDKACHLRKQAFDDAIAELDTLSEESYKDSTLIMQLLRDNLTLWTSDMSESGQAEDQQQQQQHQQQQPPAAAEGEAPK

SEQ ID NO: 587 - protein, 256 aa, Oryza sativa
MSREENVYMAKLAEQAERYEEMVEYMEKVAKTVDVEELTVEERNLLSVAYKNVIGARRASWRIVSSIEQKEEGRGNEEHVTLIKEYRGKIEAELSKICDGILKLLDSHLVPSSTAAESKVFYLKMKGDYHRYLAEFKTGAERKEAAESTMVAYKAAQDIALADLAPTHPIRLGLALNFSVFYYEILNSPDKACNLAKQAFDEAISELDTLGEESYKDSTLIMQLLRDNLTLWTSDLTEDGGDEVKEASKGDAGEGQ

SEQ ID NO: 588 - protein, 260 aa, Oryza sativa
MSPAEASREENVYMAKLAEQAERYEEMVEFMEKVAKTTDVGELTVEERNLLSVAYKNVIGARRASWRIISSIEQKEESRGNEAYVASIKEYRSRIETELSKICDGILKLLDSHLVPSATAAESKVFYLKMKGDYHRYLAEFKSGAERKEAAENTLVAYKSAQDIALADLPTTHPIRLGLALNFSVFYYEILNSPDRACNLAKQAFDDAIAELDTLGEESYKDSTLIMQLLRDNLTLWTSDNAEDGGDEIKEAAKPEGEGH

SEQ ID NO: 589 - protein, 206 aa, Oryza sativa
MAEVEAAPIAAAETPEVAAAEGAAAAKAPHKLHRQWAFWYDIQSKPKPGAAWGTSLRKAYTFDTVEEFWGLYDQIFRPSKVTVNADFHLFKAGVEPKWEDPECANGGKWTVPCSRKTTLENMWLETLMALIGEQFDESEEICGVVASVRQRGDKLALWTRTASNEAVQVNIGKKWKEIVDYNDKMVYSFHDDAKREKPSRGGRYNV

SEQ ID NO: 590 - protein, 227 aa, Oryza sativa; identical to SEQ ID NO: 585

SEQ ID NO: 591 - protein, 210 aa, Sorghum bicolor
MAEVEVPAAAVATTIPEAAEATEGGAAAEAKGPHKLHRQWTFWYDIQSKPKPGAAWGTSLKKAYTFDTVEEFWSLYDQIFRPSKLSGNADFHLFKAGVEPKWEDPECANGGKWTVPCNRKATFENMWLETLMALIGEQFDETEDICGIVASVRARGDKLALWTRTASNEAVQVNIGKKWKDVIDYNDKITYTFHDDSRREKPSRGGRYTV

SEQ ID NO: 592 - protein, 220 aa, Sorghum bicolor
MADEIDTRPASAGSRGRPAHATEDDDREEGEIADDTPAPALPVTHPLEHSWTFWFDNPQGKNKQAAWGSSIRPIHTFSTVEDFWGLYNNIHHPSKLVIGADFHCFKNKIEPKWEDPICANGGKWTISCGRGKSDTLWLHTLLAMIGEQFDYGDEICGAVVSVRGKQERIAIWTKNAANEAAQISIGKQWKEFLDYKDSIGFIVHDDAKKADKGPRNRYTV

SEQ ID NO: 593 - protein, 352 aa, Oryza sativa
MADSPSPRLDEEDAFGRDFNSSPSPTAPPARSGEKRPFGDLDDDDEDVFASKKGKTKVEESAPGAATGMILSLRESLQNCKDNLASCQVEREAAKSEVQKWHSAFQNIPAVPAGTNPDPVSVVSYLNNLKSSEESLKEQLEKAKKREAAFIVTFAKREQEIAELKSAVRDLKTQLRPPSMQTRRLLLDPAIHEEFTRLKNLVEEKEKKIKELQDNVAAVNFTPSSKHGKMLMAKCRTLQEENEEIGAMASEGKIHELGMKIAVLKTRNNELRNQFNELYKHMDGLTNDVERSNEMVAILQDELETKDVELRRLKEMLAQKEATDENKIPQENDVAGDDIVAAAESQPIKVET

SEQ ID NO: 594 - protein, 165 aa, Zea mays
MALAEADDGAVVFGEEQEALVLKSWAVMKKDAANLGLRFFLKVFEIAPSAKQMFSFLRDSDVPLEKNPKLKTHAMSVFVMTCEAAAQLRKAGKVTVRETTLKRLGATHLRYGVADGHFEVTGFALLETIKEALPADMWSLEMKKAWAEAYSQLVAAIKREMKPDA

SEQ ID NO: 595 - protein, 420 aa, Glycine max
MDKDKSLGLPPPSGRYSGYSSTGSVFNVKSEPSPSSSTTLYPPLAPGTTSSESSHFGHGLSTDSSGFSHDISRMPDNPPRNRGHRRAHSEILTLPDDISFDSDLGVVGGGDGPSFSDDAEEDLLSMYLDMDKFNSSSATSTFQMVEPSNAVGASASTPASGAPTSSTENVVIGTNERPRVRHQHSQSMDGSTTIKPEMLVSGSEDMSAADSKKAMSAAKLAELALIDPKRAKRIWANRQSAARSKERKMRYIAELERKVQTLQTEATSLSAQLTLLQRDTNGLNSENNELKLRLQTMEQQVHLQDALNDALKEEIQHLKILTGQAMPPNGGPMMNFASFGGGQQFYPNNHAMHTLLAAQQFQQLQIHPQKQQQHQFQQLQQQQREQHQQSIDLKMREATPTPCPKDNASSDVNPSGAKDC

SEQ ID NO: 596 - protein, 303 aa, Zea mays
MNTSPSRYRAMMGGWGGSDGYEGSKRTRMMMESNPYFAVNAGSPLDVSKRARMMEPGAPYFGAMGSSASGAGGGFYQPFNSNLAGAGSSTGIQSFPCVRLRGLPFDCNDIDVCKFFVGLDIVDCLLVNKNGRFTGEAFVVFPTSMQAEFALHRDRQNMGRRYVEVFRCKKHEYYCAIANEVNQGGYFEPEYRRSPPPPRPRKPSEDKGSMEYTEVLKLRGLPYSATTEDIIKFFLEYELAEENVHIAYRTDGKATGEAFVEFPTAEVAKTAMCKDKMTIGTRYVELFPSTPEEASRAKSRGRH

SEQ ID NO: 597 - protein, 339 aa, Zea mays
MVRVGLSSAPGVNLTEQIDNVFDQLINKIEHADFDTRPFLKQLNVLGRYEPIKRNVYCTKRRIEDYGISCHCKPSPGSSVVCGRDCHCGMLFSCCSSQCECDDTCTNKSFQHRPLKKTKLIKTEKCGHGLVAEDEIKKGEFVIEYVGEVIDDRTCENRLWTMKRLLDTDFYLCEVSSNMVIDATNKGNRSRFINHSCEPNTAMQKWTVDGETRVGIFALRDIKIGEELTYDYKFVQFGAAQVCHCGSSNCRKMLGTTKYSGSSQNHHAKKKKRKTSCENCIQQFLRLWHPHKKMYVGCWIIDFDQETKMHTLKFNDLHTEKFNLKEEEWHFLEVDFDED

SEQ ID NO: 598 - protein, 248 aa, Zea mays
MDSSLIDSENSMPGCACSHPECSPENCGHVSLFDGVYNSLVDINGTPMHGRFAYDEDSKIILQEGYPIYECNSSCICDSSCQNKVLQKGLLVRLELFRSENKGWAIRAAEPILQGTFVCEYIGEVVKADKAMKNAESVSSKGGCSYLFSIASQIDRERVRTVGAIEYFIDATRSGNVSRYISHSCSPNLSTRLVLVESKDCQLAHIGLFANQDIAVGEELAYDYRQKLVAGDGCPCHCGTTNCRGRVY

SEQ ID NO: 599 - protein, 891 aa, Zea mays
MASSSKASDSSQRSKRSDQGMGKDAAAASVVPIHANLTQLIRQVQSGRLAYIKEKLEVNRKTLQRHSCSLFDVAAAAEVASRGTDGGNALSQRAAERQCGSDLANGIGERDVVSVQEENLATGTLALSSSGATAQRTIVRFVKLPLVEKIPPYTTWIFLDKNQRMADDQSVVGRRRIYYDTVGNEALICSDSDEEIPEPEEEKHFFTKGEDHLIWRATQDHGLNQEVVNVLCQFIGATPSEIEERSEVLFEKNEKHSGSSDKIESRLSLDKTMDAVLDSFDNLFCRRCLVFDCRLHGCSQNLVFPCEKQPYSFDPDENKKPCGHLCYLRWREGFKEMHDDGLAGGATYTMESGTASQRVDVNVMYESEDSNRQKGNIRSMTLVGTSGSKIISSVSAEESTTTPSADISETENVSSDLPPSSLRKHKISKHGPRYREHSPGKRQKVFTSDISFEGNIMNKLSIPEIRDTRLESRESGGDKLRILDESTKKTSRKDMCGESPATTMENVGRQSNKVSSTKNFLESTLSCWSALERDLYLKGIEIFGKNSCLIARNLLSGLKTCIEVANYMYNNGPAMAKRPLLNKSISGDFAENEQDYMEQDMAARTRIYRRRGRNRKLKYTWKSAGHPTVRKRTDDGKQCYTQYSPCACQQMCGKDCPCADKGTCCEKYCGCSKSCKNKFRGCHCAKSQCRSRQCPCFAASRECDPDVCRNCWVSCGDGSLGEPLARGDGYQCGNMKLLLKQQQRILLGRSDVAGWGAFIKNPVNKNDYLGEYTGELISHKEADKRGKIYDRANSSFLFDLNDQYVLDAYRKGDKLKFANHSSNPNCYAKVMLVAGDHRVGIYAKEHIEASEELFYDYRYGPDQAPAWARRPEGSKKDEASVSHRRAHKVAR

SEQ ID NO: 600 - protein, 856 aa, Zea mays
MAQQMASVHLNDTTVVDAKPLRTLTPMFPAPLGLHTFTPQNSPSVVCVTPFGPYGGGTELGMPAVPPMFAAPVPAAGAEPSQRQPHTANMNGGDTELGMPAVPPMFAAPAPAAGAEPNQGQPHTANMNGTAVNSSVTSLQTPSAATQESGKRKRGRPKRVPDTTVSSAPSAPLAPTISPVPSLPVVTPVPSAPQELNTIVSLTPSSDAPQESGKRKRGRPKRIQDVPVMVPLTSQGDSTSVIQTLPGSSVHESGTRRGRPKRLQDSSDIVTPIDSKDSESSPQPPIAAPAESGKRKRGRPKRIDGSVTPSSHSVFSIDDDAVDTMKRGRPRKIDTKLLQFPSLFSDDPRQTADNVLMMFDALRRRLMQMDDVKQAAKQQPNLKAGSIMNNAELRVNKDKRIGEVPGVEVGDMFYFRIEMCLVGLNSQSMAGIDYMSAKFGNEEDPVAISVVSAGVYDNTGDDPDVLVYTGHGMSGKDDQKLERGNLALERSLHRGNPIRVIRSVKDLTCPTGKIYIYDGLYKIKEAWVEKGKSGFNVFKHKLLREPGQPDGIAVWKKTEKWRENPSSRDHVILLDISYGVENNPVCLVNEVDDEKGPSRFTYTTNLTYGNSLSSMRKMQGCKCISVCLPGDNNCSCTHRNAGDLPYSASGILVSRMPVLYECGDSCTCSQNCRNRVVQKGTQIRFEVFKTGDRGWGLRSWDPIRAGTFICEYAGEIIDINRVNGEDDYIFETSPLEQNLRWNYAPELLGEPSLSDSNETPKQLPIVISAKRTGNIARFMNHSCSPNVFWQPVLYDHGDEGYPHIAFFAIKHIPPMTELTYDYGQNQRNSIQMGTHSGFRKSKSCLCWSPKCRGSFG

SEQ ID NO: 601 - protein, 866 aa, Zea mays
MSSLDPSPATSTQQKQLESLVNLLTQGSRFYRKAYNELFSGVTTEQDPDSSTNIPEYMLFGWHLFLMLHSRSPELFKDLVSCIHGLVAVLAILLIHVPAKFRSFTIEGSSHLIKQTEKGVDLIASLCHNYHTSEERLKEMLHKSYNAIEDIFHMKALSASECKPENLDKIDTDDLMYFKGLIDMECFQSNLEKMEKLCNSNSCKGELDFKSILINNDYIPYDENSTGDSTNLGRSKCAFETLASPTKTIKNMLTVPSSPLSPATGGSVKIVQMTPVTSAMTTAKWLREVISSLPDKPSSKLQQFLSSCDRDLTNAVTERVSIVLEAIFPTKSSANRGVSLGLNCANAFDIPWAEARKVEASKLYYRVLEAICRAELQNSNVNNLTPLLSNERFHRCLIACSADLVLATHKTVIMMFPAVLESTGLTAFDLSKIIENFVRHEETLPRELKRHLNSLEEQLLESMAWEKGSSLYNSLIVARPSVASEINRLGLLAEPMPSLDDLVSRQNVRIEGLPATPSKKRASGPDDNADPRSPKRSCNESRNTVVERNLQTPPPKQSHMVSTSLKAKCHPLQSTFASPTVCNPVGGNEKCADVTIHIFFSKILKLAAIRIRNLCERVQCVEQTERVYNVFKQILEQQTTLFFNRHIDQLILCCLYGVAKVCQLELTFREILNNYKREAQCKPEVFSSIYIGSTNRNGVLVSRHVGIITFYNEVFVPAAKPFLVSLISSGTHPEDKKNASGQILGSPKPSPFPNLPDMSPKKVSASHNVYVSPLRQTKLDLLLSPSSRSFYACIGEGTHAYQSPSKDLAAINSRLNYNGRKVNSRLNFDMVSDSVVAGSLGQINGGSTSDPAAAFSPLSKKRETDT

SEQ ID NO: 602 - protein, 264 aa, Wheat dwarf virus
MASSSAPRFRVYSKYLFLTYPECTLEPQYALDSLRTLLNKYEPLYIAAVRELHEDGSPHLHVLVQNKLRASITNPNALNLRMDTSPFSIFHPNIQAAKDCNQVRDYITKEVDSDVNTAEWGTFVAVSTPGRKDRDADMKQIIESSSSREEFLSMVCNRFPFEWSIRLKDFEYTARHLFPDPVATYTPEFPTESLICHETIESWKNEHLYSVSLESYILCTSTPADQAQSDLEWMDDYSRSHRGGISPSTSAGQPEQERLPGQGL

SEQ ID NO: 603 - protein, 352 aa, Arabidopsis thaliana
TETKKMDSSCIDEISSSTSESFSATTAKKLSPPPAAALRLYRMGSGGSSVVLDPENGLETESRKLPSSKYKGVVPQPNGRWGAQIYEKHQRVWLGTFNEQEEAARSYDIAACRFRGRDAVVNFKNVLEDGDLAFLEAHSKAEIVDMLRKHTYADELEQNNKRQLFLSVDANGKRNGSSTTQNDKVLKTREVLFEKAVTPSDVGKLNRLVIPKQHAEKHFPLPSPSPAVTKGVLINFEDVNGKVWRFRYSYWNSSQSYVLTKGWSRFVKEKNLRAGDVVTFERSTGLERQLYIDWKVRSGPRENPVQVVVRLFGVDIFNVTTVKPNDVVAVCGGKRSRDVDDMFALRCSKKQA

SEQ ID NO: 604 - protein, 365 aa, Oryza sativa
MGVVSFSSTSSGASTATTESGGAVRMSPEPVVAVAAAAQQLPVVKGVDSADEVVTSRPAAAAAQQSSRYKGVVPQPNGRWGAQIYERHARVWLGTFPDEEAAARAYDVAALRYRGRDAATNFPGAAASAAELAFLAAHSKAEIVDMLRKHTYADELRQGLRRGRGMGARAQPTPSWAREPLFEKAVTPSDVGKLNRLVVPKQHAEKHFPLRRAASSDSASAAATGKGVLLNFEDGEGKVWRFRYSYWNSSQSYVLTKGWSRFVREKGLRAGDTIVFSRSAYGPDKLLFIDCKKNNAAAATTTCAGDERPTTSGAEPRVVRLFGVDIAGGDCRKRERAVEMGQEVFLLKRQCVVHQRTPALGALLL

SEQ ID NO: 605 - protein, 317 aa, Oryza sativa
MEQEAAMVVFSCNSGSGGSSSTTDSKQEEEEEEELAAMEEDELIHVVQAAELRLPSSTTATRPSSRYKGVVPQPNGRWGAQIYERHARVWLGTFPDEEAAARAYDVAALRFRGRDAVTNRAPAAEGASAGELAFLAAHSKAEVVDMLRKHTYDDELQQGLRRGSRAQPTPRWAREPLFEKAVTPSDVGKLNRLVVPKQQAERHFPFPLRRHSSDAAGKGVLLNFEDGDGKVWRFRYSYWNSSQSYVLTKGWSRFVREKGLRPGDTVAFSRSAAAWGTEKHLLIDCKKMERNNLATVDDDARVVVKLFGVDIVGDKTR

SEQ ID NO: 606 - protein, 249 aa, Zea mays
MVKLAFGSVGDSFSVTSIKAYVAEFIATLLFVFAGVGSAIAYGQLTNGGALDPAGLVAIAIAHALALFVGVSVAANISGGHLNPAVTFGLAVGGHITILTGVFYWVAQLLGATVACLLLGFVTHGKAIPTHAVAGISELEGVVFEVVITFALVYTVYATAADPKKGSLGTIAPIAIGFIVGANILAAGPFSGGSMNPARSFGPAVAAGDFAGNWVYWVGPLVGGGLAGLVYGDVFIGGSYQQVADQDYA

SEQ ID NO: 607 - protein, 288 aa, Zea mays
MAKQDIEASGPEAGEFSAKDYTDPPPAPLIDADELTKWSLYRAVIAEFIATLLFLYITVATVIGYKHQTDAAASGPDAACGGVGILGIAWAFGGMIFILVYCTAGIYGAHNPAVTFGLFLARKVSLVRALLYIIAQCLGAICGVGLVNGLQSAYYVRYGGGANELSDGYSKGTGLAAEIIGTFVLVYTVFSATDPKRSARDSHVPVLAPLPIGFAVFMVHLATIPITGTGINPARSLGAAVIYNKDKAWDDQWIFWVGPLIGAAIAAAYHQYVLRASATKLGSYRSNA

SEQ ID NO: 608 - protein, 228 aa, Zea mays
MARERREIKRIESAAARQVTFSKRRRGLFKKAQELSVLCDADVALIVFSSTGKLSQFASSSMNEIIDKYNTHSKNLGKTEQPSLDLNLEHSKYANLNEQLAEASLRLRQMRGEELEGLNVEELQQLEKNLESGLHRVLQTKDQQFLEQINDLERKSTQLAEENMQLRNQVSQIPPAGKQAVADTENVIAEEGQSSESVMTALHSGSSQDNDDGSDVSLKLGLPCVAWK

SEQ ID NO: 609 - protein, 233 aa, Zea mays
MVGTGKRERIAIRRIDNLAARQVTFSKRRRGLFKKAEELSILCDAEVGLVVFSATGKLFHFASSSMKQVIDRYDSHSKTLQRSEPQSSQLQSHMDDGTCARLKEELAETSLKLRQMRGEELQRLSVEQLQELEKTLESGLGSVLKTKSQKILDEISGLERKRTQLIEENSRLKEQVTRMSRMETQLGADPEFVYEEGQSSESVTNTSYPRPSTDTDDCSDTSLRLGLPLFSSK

SEQ ID NO: 610 - protein, 206 aa, Glycine max
MTRKRIQIKKIDNISSRQVTFSKRRKGLFKKAQELSTLCDADIALIVFSATSKLFEYASSSMHQVIERHDRYSAIHRLDRPSIELQIESDSNNILRKKVEDKTRELRQMNGEDLQGLTLQELQKLEEHLKRSLTNVSKVKDAKFMQEISTFKRKGVELMEENQRLKQVPSLIHAHSYRQSSESILSNSSNLPEDGGSNTSLKLGLP

SEQ ID NO: 611 - protein, 205 aa, Glycine max
MTRKRIQIKKIDNISSRQVTFSKRRKGLFKKAQELSTLCDADIALIVFSATSKLFEYASSSMHQVIERRDSHSAMNRLDRPSIELQIENDSNEILRKKVEDKNRELRQMNGEDLQGLTLQELHKLEEHLKRGLINVSKVKDEKLMQEISTLKRKGVELMEENQRLKQVVPSLIHVHRQSSESILSNSSNLPEDGGSDTSLKLGLP

SEQ ID NO: 612 - protein, 196 aa, Triticum sp.
MGRGRSEIKRIDNPTQRQSTFYKRRDGLFKKARELAVLCDADLLLLLFSASGKLYQYLAPTVPSVKEFVERYEASRHTKVWSDIRQERRRELEKVAKMCDLLEKELRFMTVDDGERYTVPSLAALEHNLEAAMHKVRSEKDRKIGGEMSYLENMIRGKQAERYGLCDKLAHAQSLKVVEGGSTSLNNGLDLKLGFN

SEQ ID NO: 613 - protein, 225 aa, Zea mays
MARERREIRRIESAAARQVTFSKRRRGLFKKAEELAVLCDADVALVVFSATGRLSQFASSSVNDIVDKYSTHSKNLGKSHQQPSIDLNVEQSKYSGLNEQLAEETNGLRQMRGEDLEGLSVEELHRMERKLEAGLHRVISTKDQLFMQQIGELLQKGTQLEDENRRLKEQMPQVLTAGTMVVAAAAENILTEDGQSSESVMTALHSGSSLDCDDGSDISLKLSLP

SEQ ID NO: 614 - protein, 245 aa, Zea mays
MGRGKVQLKRIENKINRQVTFSKRRSGLLKKAHEISVLCDAEVALIIFSTKGKLYEYSTDSCMDKILERYERYSYAEKVLISAEYETQGNWCHEYRKLKAKVETIQKCQKHLMGEDLETLNLKELQQLEQQLESSLKHIRTRKSQLMVESISALQRKEKSLQEENKVLQKELAEKQKDQRQQVQRDQTQQQTSSSSTSFMLREAAPTTNVSIFPVAAGGRVVEGAAAQPQARVGLPPWMLSHLSC

SEQ ID NO: 615 - protein, 382 aa, Arabidopsis thaliana
MDLSKVTLDIFTKLEQKWLSHCDSSRKTRILSIDGGGTTGIVAAASILHLEHQIRLQTGDPHAHISDFFDIVAGTGIGGILAALLVADDGSGRPMFTARDAVKFVAEKNSELFEIRYTGVFRRNKRYSGKSMERVLETAFRREDGKVLTMKDTCKPLLVPCYDLKTSAPFVFSRAGASESPSFDFELWKVCRATSATPSLFKPFSVVSVDGKTSCSAVDGGLVMNNPTAAAVTHVLHNKRDFPSVNGVDDLLVLSLGNGPSTMSSSPGRKLRRNGDYSTSSVVDIVVDGVSDTVDQMLGNAFCWNRTDYVRIQANGLTSGGAEELLKERGVETAPFGVKRILTESNGERIEGFVQRLVASGKSSLPPSPCKESAVNPLADGR

SEQ ID NO: 616 - protein, 577 aa, Anabaena
MYFLPVLQTDTVIILNLASVREGNLDVYIDENIDNVIKTFGNGELTIGQWHFFAIVFNGGQLTIYLDDHEYTGSLTGSSLNKATSPITMGATLHNNVYFTGQLANISVWNYPCTQDQIQTHRSSPLVGNEPGLVAYWRLNEGEGTTVQDQSGNTHNGTLYGDPSWNLAQVLFAIAQSSSEGHRPSSSPAEIAEIAQTTEYPIPDNIQQQEQAQTPSQEESKQTMNNTANPKYKILAIDGGGIRGIIPAIILTEIEKRTQKQIFSLFDLIAGSSSGGILALGLTKPRLDLAGSDSPPVAQYSAEELLQIYLEYGAEIFYEPFWEQLLGQLEDIFVQPKYSSEGREEIIKQYFGDSPLENNLKEVFVTSYDIEQRIPIFFTNKLEKQQTKSKKFRKLCLGFTLTDAALATSATPTYFAPYRVSSSHNTNGFYTLVDGGLVANNPANLAILEAQISRQENQQALNMEDILVVSLGTGSLTSVYPYDQVKNWGLLQWTKPLLNMVLDGGSEVVAGELERLFEATNKGHKTSYYRFQPFLKSELEDIDNAKPENLRQLQTLANILIQEKNQEIDELCSILSS

SEQ ID NO: 617 - protein, 240 aa, Zea mays
MMEGGSRADGRNPNQLRPFTCTGNPLHRAHGSARWAQGDTVVLAAVYGPKPGTRKGENPEKASIEVVWKPKTGQIGRQEREYEMTLKRTLQSICLLTVHPNTTTSVVLQVVGDDGSLMPCAINASCAALAFAGIPMKHLAVAISCGVMDNGVVILDTSRAEEQQARSFAHLVFPNSRKSVESKDPTQRDEESERGLITCITHGAMSEDDYFNCIERGVMASSRISDFMRKTLQKEASRDA

SEQ ID NO: 618 - protein, 1286 aa, Saccharomyces cerevisiae
MSEGFSSSSIQELYQSLKEITNNADVELFEDRITKLDFESTDEPKHANDIIKDRFLRPSNALPWSLLDMVQDVPHTSSPEDCSGKLDYKELLKVPDPINRTSYQFKRTGLEGKISGYKEEVDLKEVANANASNSLSITRSINHNQNSVRGSTAQLPFTPGGIPMKSVKTDSEQNGSSTMANATKLLHKDGQGLFDIPEGMNRGIKPMDSPAENEDQNGQFKELKQLNEIDNELDIRIEANEAKLKEEEKSAKSISEEIMEEATEETTADNADDAEIDELLPIGIDFGRTKPVSKSVPVKKEWAHVVDLNHKIENFDELIPNPARSCPFELDTFQKEAVYHLEQGDSVFVAAHTSAGKTVVAEYAIAMAHRNMTKTIYTSPIKALSNQKFRDFKETFDDVNIGLITGDVQINPDANCLIMTTEILRSMLYRGADLIRDVEFVIFDEVHYVNDQDRGVVWEEVIIMLPQHVKFILLSATVPNTYEFANWIGRTKQKNIYVISTPKRPVPLEINIWAKKELIPVINQNSEFLEANFRKHKEILNGESAKGAPSKTDNGRGGSTARGGRGGSNTRDGRGGRGNSTRGGANRGGSRGAGAIGSNKRKFFTQDGPSKKTWPEIVNYLRKRELLPMVVFVFSKKRCEEYADWLEGINFCNNKEKSQIHMFIEKSITRLKKEDRDLPQILKTRSLLERGIAVHHGGLLPIVKELIEILFSKGFIKVLFATETFAMGLNLPTRTVIFSSIRKHDGNGLRELTPGEFTLAGRAGRRGLDSTGTVIVMAYNSPLSIATFKEVTMGVPTRLQSQFRLTYNMILNLLRIEALRVEEMIKYSFSENAKETLQPEHEKQIKVLQEELQTIEYKSCEICDNDIEKFLELMLAYKEATVNLMQEMVKSPSILHILKEGRLVAFRDPNDCLKLGFVFKVSLKDAVCVIMTFTKPYKLPNGEPNHLIYFPKADGYRRRNFPKFQKTDFYMEEVPVTAIEVITKRKFAAPLGKVIKKDVAALNEFNAETNNILDGKTLKEAINIEKQGLKIHQILLDRTNIRDEIFKLKSIKCPNLSQHIVPKFKAHVIKKKIEELYHLMSDQNLSLLPDYEKRLAVLKDTEFIDQNHNVLLKGRVACEINSGYELVLTELILDNFLGSFEPEEIVALLSVFVYEGKTREEEPPIVTPRLAKGKQRIEEIYKKMLCVFNTHQIPLTQDEAEFLDRKRFAMMNVVYEWARGLSFKEIMEMSPEAEGTVVRVITWLDEICREVKTASIIIGNSTLHMKMSRAQELIKRDIVFAASLYL

SEQ ID NO: 619 - protein, 1432 aa, Saccharomyces cerevisiae
MSDIKQLLKEAKQELTNRDYEETIEISEKVLKLDPDNYFAHIFLGKALSSLPASNNVSSNRNLERATNHYVSAAKLVPDNLLAWKGLFLLFRTTEVVPDILSYDEYFDLCGQYADALLKQEQSQVELINDIKLLKKTHPDCQKAFYQHLKPGSLMAETIGRHLSTPQDALLNLIKILSNIETTEIGKTLSQNRLKLKASDPDYQIKLNSFSWEIIKNSEIDQLYNQLVNILADDQKRSEIENQWLEYRIKVLKSMPLDVKKDFFTKVKEMVEDMVLVNHQSLLAWQKYFEWTDYEDLDNMDAPLIIKYFKKFPKDPLAMILYSWLSSKLSKYDIKSLESANKPPEGHKKTEKETDIKDVDETNEDEVKDRVEDEVKDRVEDEVKDQDEEAKEDEEEDLDDIEIGLLEEEVVTVLTENIVKCKNNILAHRILCQYYLLTKEYEAALPYIKNGISLIAYNIKDLGVHLPLTKREFSLDLATVYTYVDAPKDHNAALKLYDNILSGDFSNIQAKMGKGIIFIERKNWKDAMTLLTQVHEQSPNNLEVLSELSWSKAHMGYMDEALAGLDTVIKGIKGMDLRSIDFRALNLWRQAKVYIMKHASINDAKQENVKCAFKLLIQSIKILDTFAPGFSTLGDIYCHYYKDHLRAFKCYFKAFDLDAGDYTAAKYITETYASKPNWQAASSIASRLIKGEKAKAELRSNNWPFRVVGIAHLEKQEESDSIEWFQSALRVDPNDVESWVGLGQAYHACGRIEASIKVFDKAIQLRPSHTFAQYFKAISLCDVGEYLESLDILEKVCQEAATEESFQIGLVEVLMRCSLDLYSQGFLLKSVSIAKDTIERIKIIISELKCENQQVWIYLSQVLRLFIWIESKVDTLPVESLVSIFENSQFSGSEEIDSVDNIKIDTLLDSTTDDNVSIACKFLILASKYSVSDQKFTDIAGTVRASYWYNIGISELTAFITLKEPQYRDAAIFAFKKSIQLQSNISETWIGLGIATMDINFRVSQHCFIKATALEPKATNTWFNLAMLGLKKKDTEFAQQVLNKLQSLAPQDSSPWLGMALILEEQGDIIGSSKLFAHSFILSNGRSKAAQFMYAKNVLENHINNGDDERDIETVEKLTTASIALEQFFKKSPDSQFALQCALLTLERLHHYENANELANRLIGILEKKFEKTQDERELFNFAIIKGQFARIHLGLGNFELSIENADLSQGIISESSDEKSMKTKISNHICLGLSYFFLNDFDQTLNQFQELLSISKDSKHLVVLIAKVLYDVGESDTKEIALQELTEYIATSGADLLVTLTIAAMSILDDKREDLSIILEELKALPLSKQIIDKHKDAPYLIEEITKRLYRNDTGKQVWQRSAYFFPNNLKVWERLDKNIQRRIASNGQNKVTAEEMSKLYCESKNLRSIQRGMFLCPWNVTAVKALNECF

SEQ ID NO: 620 - protein, 292 aa, Saccharomyces cerevisiae
MACNFQFPEIAYPGKLICPQYGTENKDGEDIIFNYVPGPGTKLIQYEHNGRTLEAITATLVGTVRCEEEKKTDQEEEREGTDQSTEEEKSVDASPNDVTRRTVKNILVSVLPGTEKGRKTNKYANNDFANNLPKEGDIVLTRVTRLSLQRANVEILAVEDKPSPIDSGIGSNGSGIVAAGGGSGAATFSVSQASSDLGETFRGIIRSQDVRSTDRDRVKVIECFKPGDIVRAQVLSLGDGTNYYLTTARNDLGVVFARAANGAGGLMYATDWQMMTSPVTGATEKRKCAKPF

SEQ ID NO: 621 - protein, 246 aa, Saccharomyces cerevisiae
MSRLEIYSPEGLRLDGRRWNELRRFESSINTHPHAADGSSYMEQGNNKIITLVKGPKEPRLKSQMDTSKALLNVSVNITKFSKFERSKSSHKNERRVLEIQTSLVRMFEKNVMLNIYPRTVIDIEIHVLEQDGGIMGSLINGITLALIDAGISMFDYISGISVGLYDTTPLLDTNSLEENAMSTVTLGVVGKSEKLSLLLVEDKIPLDRLENVLAIGIAGAHRVRDLMDEELRKHAQKRVSNASAR

SEQ ID NO: 622 - protein, 747 aa, Saccharomyces cerevisiae
MSLLEQLARKRIEKSKGLLSADQSHSTSKSASLLERLHKNRETKDNNAETKRKDLKTLLAKDKVKRSDFTPNQHSVSLSLKLSALKKSNSDLEKQGKSVTLDSKENELPTKRKSPDDKLNLEESWKAIKEMNHYCFLKNDPCINQTDDFAFTNFIIKDKKNSLSTSIPLSSQNSSFLSLKKHNNELLGIFVPCNLPKTTRKVAIENFNRPSPDDIIQSAQLNAFNEKLENLNIKSVPKAEKKEPINLQTPPTESIDIHSFIATHPLNLTCLFLGDTNAGKSTLLGHLLYDLNEISMSSMRELQKKSSNLDPSSSNSFKVILDNTKTERENGFSMFKKVIQVENDLLPPSSTLTLIDTPGSIKYFNKETLNSILTFDPEVYVLVIDCNYDSWEKSLDGPNNQIYEILKVISYLNKNSACKKHLIILLNKADLISWDKHRLEMIQSELNYVLKENFQWTDAEFQFIPCSGLLGSNLNKTENITKSKYKSEFDSINYVPEWYEGPTFFSQLYLLVEHNMNKIETTLEEPFVGTILQSSVLQPIAEINYVSLKVLINSGYIQSGQTIEIHTQYEDFHYYGIVSRMKNSKQILETNTKNNISVGLNPDILEVLVKIHNTEDFTKKQFHIRKGDIIIHSRKTNTLSPNLPNTLKLLALRLIKLSIQTHALSDPVDLGSELLLYHNLTHNAVKLVKILGTNDISINPNQSLIVEVEIIEPDFALNVIDSKYITNNIVLTSIDHKVIAVGRIACQ

SEQ ID NO: 623 - protein, 826 aa, Oryza sativa
MGSDVGPSTARLNGSCRHGPRAGVPCRSWAGYSAAVLGPARLGPAHLARYTSRLQSSSPQRPKPPPPSPRYRQRRLPSLRPSSSGGRAACRPSPRDRQRRLPSAVPPPPASVAASHQRRPVGVPQAPARDHQSSPLPELARLPCVSRMPRKVVSGPDYDDEYNDDYDEYDEDYDDYGGTGHSDDIQHPTKEKESSKKSSSMVPVLWRCSMCMFDNHESMVYCEMCGVFRESFMKSAKDGSIKVHGIPSDFGTPSMPKSDSTKMPVNTRTTDFGGDPEIKNASISHEKVGSTQYASVGSSSGAGKKVKHIALPEDVPVERTAQLISDHFQLKEDQSSRATSSAQNEDVAQKLSSDIQKLGLEKNEVDTAKPYLPEEYKPEKWMFANEESGVLSQLNLAIVGHVDSGKSTLSGRLLHLLGRISKKDMHKNEKEAKEKGKGSFAYAWAMDESSEERERGVTMTVAVAYLETNKYRVVLLDSPGHKDFVPNMISGATQADAAILVVDACTGSFEAGMDGEGGKSVGQTKEHAQLIRSFGVEQLIVAVNKMDAIGYSKERFEFIKVQLGSFLRACNFKDSSVTWIPLSAVENQNLIKIPSDVRLTSWYQGFCLLDAIDSLQLPSRDVSKPLILPICDVIKSQSTGQLAAFGKLETGAIRIGSKVLISPCGEVATVKSIERDSNSCDIARAGDNVAVSLQGIDGSKLIAGGILCNPGFPVPVSNFLELRVLVLDVTIPILIGYQVEFHIHHVKEAARVTKIVALLDKAGKPSKTAPRFLKSKQNAVVQVTLDAPVCVEEFSKCRALGRAFLRSGGSTIAVGVVTRVLGQDQN

SEQ ID NO: 624 - protein, 199 aa, Zea mays
MAATAMDHDGGDDVVTPGELLGNSLTLAAGRGAYADGRSVRASVTGRRRIVPPAPASDDQRSTVEVVGHKAHGAVPQPGSVVIARVTKVMARMASADIMCVDSKAIREKFTGMIRQQDVRATEIDKVDMYQSYRPGDIVKAMVLSLGDARAYYLSTAKNELGVVSAQSIAGGTLVPISWTEMQCDLTGQIEQRKVAKVE

SEQ ID NO: 625 - protein, 287 aa, Zea mays
MVGLSEGEKHFIRGGIAQDVRTDGRRRLQFRSLSVQTGVIPQANGSARVRLGATEIIASVKAELGKPSILHPDKGKVAIFVDCSPTAEPLFEGRGSEELSAELSVSLQRCLLGGKSGAGAAIDLSSLIVVDGKVCWDLYIDGLVVSSDGNLLDALAVAIKVALSDTGIPKVNVSVSAASDEEPEVDVSDEEFLQFDTSGVPVIITLTKVGRHYIVDATSEEESQMSSAVSVSVNRHGQICGLTKRGGAGLDPSVIFDMISVAKHVSQQFISLLDSEIAAAEAEEEAQ

SEQ ID NO: 626 - protein, 406 aa, Oryza sativa
MAAAATTSSHLLLLSRQQAAASLQCGLSFRRQPGRLAGGSSAPSVRCMAAVDTASAPAATEASKKSSYEITTLTTWLLKQEQAGTIDGEMTIVLASISTACKQIASLVQRAPISNLTGVQGAVNVQGEDQKKLDVVSNEVFSNCLKSSGRTGVIASEEEDVPVAVEESYSGNYIVVFDPLDGSSNIDAAVSTGSIFGIYSPNDECLADIADDQNLDQVEQRCIVSVCQPGSNLLAAGYCMYSSSVIFVLTIGTGVYVFTLDPMYGEFVLTQEKVQIPKAGKIYAFNEGNYALWDDKLKSYMDSLKEPGPSGKPYSARYIGSLVGDFHRTLLYGGIYGYPRDQKSKNGKLRLLYECAPMSFIVEQAGGKGSDGHQRILDIMPTEIHQRVPLYIGSVEEVEKVEKFLA

SEQ ID NO: 627 - protein, 332 aa, Escherichia coli
MKTLGEFIVEKQHEFSHATGELTALLSAIKLGAKIIHRDINKAGLVDILGASGAENVQGEVQQKLDLFANEKLKAALKARDIVAGIASEEEDEIVVFEGCEHAKYVVLMDPLDGSSNIDVNVSVGTIFSIYRRVTPVGTPVTEEDFLQPGNKQVAAGYVVYGSSTMLVYTTGCGVHAFTYDPSLGVFCLCQERMRFPEKGKTYSINEGNYIKFPNGVKKYIKFCQEEDKSTNRPYTSRYIGSLVADFHRNLLKGGIYLYPSTASHPDGKLRLLYECNPMAFLAEQAGGKASDGKERILDIIPETLHQRRSFFVGNDHMVEDVERFIREFPDA

SEQ ID NO: 628 - protein, 388 aa, Synechocystis PCC6803
VDSTLGLEIIEVVEQAAIASAKWMGKGEKNTADQVAVEAMRERMNKIHMRGRIVIGEGERDDAPMLYIGEEVGICTREDAKSFCNPDELVEIDIAVDPCEGTNLVAYGQNGSMAVLAISEKGGLFAAPDFYMKKLAAPPAAKGHVDIDKSATENLKILSDCLNRSIEELVVVVMDRPRHKELIQEIRNAGARVRLISDGDVSAAISCAFSGTNIHALMGIGAAPEGVISAAAMRCLGGHFQGQLIYDPEVVKTGLIGESREGNLERLASMGIKNPDQVYNCEELACGETVLFAACGITPGTLMEGVRFFHGGVRTQSLVISSQSSTARFVDTVHMKGKPQSNPTALISLSATIPKKVKTWGNTSPFPLSPEVQTLGDLCFGWVIVTGV

SEQ ID NO: 629 - protein, 347 aa, Synechocystis PCC6803
MTVSEIHIPNSLLDRDCTTLSRHVLQQLNSFGADAQDLSAIMNRIALAGKLIARRLSRAGLMADVLGFTGETNVQGESVKKMDVFANDVFISVFKQSGLVCRLASEEMEKPYYIPENCPIGRYTLLYDPIDGSSNVDINLNVGSIFAIRQQEGDDLDGSASDLLANGDKQIAAGYILYGPSTILVYSLGSGVHSFILDPSLGEFILAQENIRIPNHGPIYSTNEGNFWQWDEALRDYTRYVHRHEGYTARYSGALVGDIHRILMQGGVFLYPGTEKNPDGKLRLLYETAPLAFLVEQAGGRASDGQKRLLDLIPSKLHQRTPAIIGSAEDVKLVESFISDHKQRQGN

SEQ ID NO: 630 - protein, 429 aa, Oryza sativa
MSSPPPAAAAAMAVDDADDDQLASMSTENIVRATRLLDNETRVLKDELQRTNLEVESYKEKIKENQEKIKLNKQLPYLVGNIVEILEMNPEDEAEEDGANIDLDSQRKGKCVVLKTSTRQTIFLPVIGLVDPEKLKPGDLVGVNKDSYLILDTLPSEYDSRVKAMEVDEKPTEDYNDIGGLEKQIQELVEAIVLPMTHKDRFQKLGIRPPKGVLLYGPPGTGKTLMARACAAQTNATFLKLAGPQLVQMFIGDGAKLVRDAFQLAKEKSPCIIFIDEIDAIGTKRFDSEVSGDREVQRTMLELLNQLDGFSSDERIKVIAATNRADILDPALMRSGRLDRKIEFPHPSEEARARILQIHSRKMNVNPDVNFEELARSTDDFNGAQLKAVCVEAGMLALRRDATEVTHEDFNEGIIQVQAKKKSSLNYYA

SEQ ID NO: 631 - protein, 434 aa, Saccharomyces cerevisiae
MATLEELDAQTLPGDDELDQEILNLSTQELQTRAKLLDNEIRIFRSELQRLSHENNVMLEKIKDNKEKIKNNRQLPYLVANVVEVMDMNEIEDKENSESTTQGGNVNLDNTAVGKAAVVKTSSRQTVFLPMVGLVDPDKLKPNDLVGVNKDSYLILDTLPSEFDSRVKAMEVDEKPTETYSDVGGLDKQIEELVEAIVLPMKRADKFKDMGIRAPKGALMYGPPGTGKTLLARACAAQTNATFLKLAAPQLVQMYIGEGAKLVRDAFALAKEKAPTIIFIDELDAIGTKRFDSEKSGDREVQRTMLELLNQLDGFSSDDRVKVLAATNRVDVLDPALLRSGRLDRKIEFPLPSEDSRAQILQIHSRKMTTDDDINWQELARSTDEFNGAQLKAVTVEAGMIALRNGQSSVKHEDFVEGISEVQARKSKSVSFYA

SEQ ID NO: 632 - protein, 1729 aa, Saccharomyces cerevisiae
MVASTKRKRDEDFPLSREDSTKQPSTSSLVRNTEEVSFPRGGASALTPLELKQVANEAASDVLFGNESVKASEPASRPLKKKKTTKKSTSKDSEASSANSDEARAGLIEHVNFKTLKNGSSLLGQISAITKQDLCITFTDGISGYVNLTHISEEFTSILEDLDEDMDSDTDAADEKKSKVEDAEYESSDDEDEKLDKSNELPNLRRYFHIGQWLRCSVIKNTSLEPSTKKSKKKRIELTIEPSSVNIYADEDLVKSTSIQCAVKSIEDHGATLDVGLPGFTGFIAKKDFGNFEKLLPGAVFLGNITKKSDRSIVVNTDFSDKKNKITQISSIDAIIPGQIVDLLCESITKNGIAGKVFGLVSGVVNVSHLRTFSEEDLKHKFVIGSSIRCRIIACLENKSGDKVLILSNLPHILKLEDALRSTEGLDAFPIGYTFESCSIKGRDSEYLYLALDDDRLGKVHSSRVGEIENSENLSSRVLGYSPVDDIYQLSTDPKYLKLKYLRTNDIPIGELLPSCEITSVSSSGIELKIFNGQFKASVPPLHISDTRLVYPERKFKIGSKVKGRVISVNSRGNVHVTLKKSLVNIEDNELPLVSTYENAKNIKEKNEKTLATIQVFKPNGCIISFFGGLSGFLPNSEISEVFVKRPEEHLRLGQTVIVKLLDVDADRRRIIATCKVSNEQAAQQKDTIENIVPGRTIITVHVIEKTKDSVIVEIPDVGLRGVIYVGHLSDSRIEQNRAQLKKLRIGTELTGLVIDKDTRTRVFNMSLKSSLIKDAKKETLPLTYDDVKDLNKDVPMHAYIKSISDKGLFVAFNGKFIGLVLPSYAVDSRDIDISKAFYINQSVTVYLLRTDDKNQKFLLSLKAPKVKEEKKKVESNIEDPVDSSIKSWDDLSIGSIVKAKIKSVKKNQLNVILAANLHGRVDIAEVFDTYEEITDKKQPLSNYKKDDVIKVKIIGNHDVKSHKFLPITHKISKASVLELSMKPSELKSKEVHTKSLEEINIGQELTGFVNNSSGNHLWLTISPVLKARISLLDLADNDSNFSENIESVFPLGSALQVKVASIDREHGFVNAIGKSHVDINMSTIKVGDELPGRVLKIAEKYVLLDLGNKVTGISFITDALNDFSLTLKEAFEDKINNVIPTTVLSVDEQNKKIELSLRPATAKTRSIKSHEDLKQGEIVDGIVKNVNDKGIFVYLSRKVEAFVPVSKLSDSYLKEWKKFYKPMQYVLGKVVTCDEDSRISLTLRESEINGDLKVLKTYSDIKAGDVFEGTIKSVTDFGVFVKLDNTVNVTGLAHITEIADKKPEDLSALFGVGDRVKAIVLKTNPEKKQISLSLKASHFSKEAELASTTTTTTTVDQLEKEDEDEVMADAGFNDSDSESDIGDQNTEVADRKPETSSDGLSLSAGFDWTASILDQAQEEEESDQDQEDFTENKKHKHKRRKENVVQDKTIDINTRAPESVADFERLLIGNPNSSVVWMNYMAFQLQLSEIEKARELAERALKTINFREEAEKLNIWIAMLNLENTFGTEETLEEVFSRACQYMDSYTIHTKLLGIYEISEKFDKAAELFKATAKKFGGEKVSIWVSWGDFLISHNEEQEARTILGNALKALPKRNHIEVVRKFAQLEFAKGDPERGRSLFEGLVADAPKRIDLWNVYVDQEVKAKDKKKVEDLFERIITKKITRKQAKFFFNKWLQFEESEGDEKTIEYVKAKATEYVASHESQKADE

SEQ ID NO: 633 - protein, 994 aa, Oryza sativa
MGAANFAHSLADKPKQMPERLANTIFTSCASTLPKCSPSIDVLHIGHIKEHFSAEVIWHHKHYGQILPGDAYQNDSSQPSTSGSSSSLSAVWDQTTCSSAMRTLPMDSFSTVNGQNLSTNNKSLYPTTGQGPLLQQYIECEMKQETWSRSLEQSDQSNITTGNRDLYHAQIHPYINGEHKRDRCIQMKEKLGHTSDHEGFSREKSSNLSNHFMHHQQGFMTNYGACSPVSKTVDRAEQTSNSTVSKPTSPASDGSSGKHYPAKRLKVDVPHLVHVNEMEASKEQQPAANETYASAETVQSEVTNSPTKSPCCTSLGDNIACTDNVHGMDMVRLSGSAVQTEEEFRRENSDIEMKDAKVDLLDQTLSGDSLRARKRRGASVLYALTSEELKDHLCTLNHDTSQSKVPTEELLSVEGLPDQNTCNLCGMERLLFEPPPRFCALCFKIINSTGSYYVEVENGNDKSSICGRCHHLSSAKAKYQKRFSYAETDAEAEWWVQCDKCKAWQHQICALFNPKIVDPEAEYTCAKCFLKEKDNEDVDSLEPSTILGARELPRTRLSDHIEQRLSERLVQERQQRAIASGKSVDEVPGVEGLTVRVVSSADRTLQVQPRFKDFFKKEQYPGEFPYKSKAILLFQKNEGVDVCLFAMYVQEYGSACPSPNQRHVYLAYIDSVKYFRPEIKSASGEALRTFVYHEILIGYLDFCKKRGFVSCSIWTCPSTKRDDYVLYCHPTIQKMPKSDKLRSWYQNLVKKAVKEGVVVERNTLYDFFLQPTNECKTNISAAWLPYCDNDFWPGEAERLLEKKDDDTSQKKETQLGRLLRVAKRDDRKGNLEDILLVHKLGERLRTMKEDFLMLCLQQFCKHCHHPIVSGSSWVCTSCKNFFLCERCYAEELNTPLKDRHPATTKQKHAFERIEEEPLPETDDVDPTMESKNCSSMVYDVIPVPVVEEVAICVYSCGNCCSRTHCFVTMQTVQLPDAGKVCITRNIDLPSGVVK

SEQ ID NO: 634 - protein, 826 aa, Oryza sativa
MVVVDASEFGAEGFDPKRWINAALDARHPSEPLDRFLADAEERLRSAADDAAAALERDSADALRRVPLACRDALRLRDDAVSLRSHLASVLQSLSQQAEGSSAESITALARIDTVKQRMEAAYATLQDAAGLAQLSQSVEDVFSSGDLPKAAETLATMRHCLSAVGEVAEFANVRKQLEVLEERLDDMVQPRLVDALSNRKVDAVQDLRGILIRIGRFKSLEVQYTKIHVKPLKKLWEDFDLKQRAKRVEMEKYGGESINSLSFASWLPNFYDETLLYLEQEWKWCLTAFPEEYKSLVPKVLVETMSELNSSFVSRVNLATGDAVPETRSVAKGILDVLSGDLPKSTKLQNKHLGALIDLHNMTGTFARNIQHLFSESDLLVLLNTLKAIYSPYETFKARYGQMERALLSAEMAGIDIRGAIARGVGAQGIELSETVRRMEESIPQIIVLLEAAVERCISLTGGSEADELVLALDDIMLQYISNLQETLKSLRIVCGVDNTAHSDSSKKEAGLEKKEAQRLVDVSEEEEWSIVQGALQILTVADCLTSRTSVFEASLRATLARIGTNFSISGFGSSLDKSTAANGDENAEVPITGRAALDIAAIRLTDLPDKSKKLFTVLEQSKDPRFHALPLTSQRVAAFSDTVNELVYDVLISKVRQRLNEVARLPIWSSVEEPGGLPLPSFSAYPQAYVTSVGEYLLTLPQQLEPLAEGISGGEAGNEEAQFFATEWIFKVAEGATALFMEQLRGIHYITDRGAQQLAADIEYLSNVLSALSMPIPPFLATFHTCISTPRDQVRDLIKSDGGSQLDLPTAHLVCKIRRISSSD

SEQ ID NO: 635 - protein, 243 aa, Zea mays
MASADLLRKEEEFYSSLFDSAKGDGVKSRSQVIERKIESLEDMATKVSNRRSRRWLNDRLLIELVPRLHVEEIKGLFAPPPWGEELPLSAFCRTSVSDWEAFRSIDMDAEARLMQHMKRSSEKQRTHVDEDELIALNAWRRIGRQTREAIKKKFLPDLLQIYEEQVRAFIEGTGDSDVLVLNVQDPFQRLLLHGVCEFYNVTSMTTSSVRDGKPWKSTTIKKRHVTGLPPRITLVSFLRMRKN

SEQ ID NO: 636 - protein, 162 aa, Zea mays
MASPSSSPSRKALSKIACSRLQKELAEWQVNPPAGFKHRVTDDLQRWVIDVAGAAGTLYTGETYKLQVDFPEHYPMEAPQVIFLHPAPMHPHIYSNGHICLDILYDSWSPAMTVSSICISILSMLSSSPEKQRPADNDRYVKNCRNGRSPKETRWWFHDDTV

SEQ ID NO: 637 - protein, 232 aa, Zea mays
MAPSLLGGFTKSLAMTVLSEIGDKTFFAAAILAMRHPRKLVLAGCLTALIVMTALSASLGWVAPNLISRKWTHHLTTLLFFLFGIWSLWEGFKEDGDSEELAEVEAELDAAFKSNKGESKNKFKANDDMKKQQRPFLMQFFSPIFLKAFSITFFGEWGDKSQIATIGLAADENPFGVVLGGIIAQALCTTAAVLGGKSLASQISEKMVELSSGVLFLLFGIMSLLSGPEGEL

SEQ ID NO: 638 - protein, 429 aa, Oryza sativa
MSSPPPAAAAAMAVDDADDDQLASMSTEDIVRATRLLDNETRVLKDELQRTNLEVESYKEKIKENQEKIKLNKQLPYLVGNIVEILEMNPEDEAEEDGANIDLDSQRKGKCVVLKTSTRQTIFLPVIGLVDPEKLKPGDLVGVNKDSYLILDTLPSEYDSRVKAMEVDEKPTEDYNDIGGLEKQIQELVEAIVLPMTHKDRFQKLGIRPPKGVLLYGPPGTGKTLMARACAAQTNATFLKLAGPQLVQMFIGDGAKLVRDAFQLAKEKSPCIIFIDEIDAIGTKRFDSEVSGDREVQRTMLELLNQLDGFSSDERIKVIAATNRADILDPALMRSGRLDRKIEFPHPSEEARARILQIHSRKMNVNPDVNFEELARSTDDFNGAQLKAVCVEAGMLALRRDATEVTHEDFNEGIIQVQAKKKSSLNYYA

SEQ ID NO: 639 - protein, 247 aa, Zea mays
MASADLLRREEEFYSSLFDSAKGDGARSRSQLIERKIEALEDMATRVSNRRSRKWFNDRLLIELVPRLYVEEIKGLFAPPPWGEQVPLSAFYRANVGEWDSFRSIDMDAEARLMQHMKKSLEKPRNHVDEGESIALNAWHRIDRHTREAIKRNFLPDLLGIYEERVRAFIEDASDKDALVLNVQDPFQRLLLHGVCEFYNVSSTTTSSVREDGRPWKATTIKKRQGTGVPSRITLVSFLRMKKNGSQ

SEQ ID NO: 640 - protein, 669 aa, Zea mays
MKVANGLSLRKSNGRFKSKLMMELVKQWREHQANMRCMNLSKRNNNIYVGAEGANITSPNDSNIWPTSALVAKNSNPRYVLASKCASQPPTMWLENSLNTSSGFKCSKLSIVRNALPSKTPKASVSWKSKDDSNAIPRHLEQSHCKKTSRATRTHFKAMPNLIHKAKNVDTSNLNDGTSGSSWRGQSDSYKGEDINIGKECTKTSELLKSREASRKSNILVVDRKDPNKDEPDKVKGIQDEVMTKEEGVKGHTCEGRATCWSCLKQANTTKTNDAPNLGSLLVGNEHMQGLMSNLRDNSSHLFEKNHSRHQRDDPCEYRETNLKFPNRIQSVGGNGKTNDVTSRRKRLLLEEKASAHVQNDLTYGPMKRRRYIEANEDEEEQNDLTYGPMKRRRYIEANEDEEDYVGDHHPVHIEDATTELTPQDSISKHCVERQCYCCSKPIDIPRWSGTFKIDGKEHISLAGHLSSKSCEKVWKLSSLPKVVQVTKVPRMAVWPKIFKASEPSGDNIGLYFFPPEMRHDEELDQLVNEVMDKDLILRAIIGEAEMLIFPSVLLPERYQTFQTKHYLWAAFKAKEDKGDAIVEEEVEKGNCVSNQPDKVQSDNASFPSNHGLDRPSMEAPPQSSSSVFGIVVRQAPNLEPEVKRFIQEMERKGALVTVMRGEAIGGGP

SEQ ID NO: 641 - protein, 199 aa, Arabidopsis thaliana
MVQTKKFRGVRQRHWGSWVAEIRHPLLKRRIWLGTFETAEEAARAYDEAAVLMSGRNAKTNFPLNNNNTGETSEGKTDISASSTMSSSTSSSSLSSILSAKLRKCCKSPSPSLTCLRLDTASSHIGVWQKRAGSKSDSSWVMTVELGPASSSQETTSKASQDAILAPTTEVEIGGSREEVLDEEEKVALQMIEELLNTN

SEQ ID NO: 642 - protein, 243 aa, Oryza sativa
MGQSKKKFRGVRQRHWGSWVSEIRHPLLKRRVWLGTFETAEEAARAYDEAAILMSGRNAKTNFPVARNATGELTPAAAVAGRDGRVGGGSGSSSSMTANGGGNSLSQILSAKLRKCCKTPSPSLTCLRLDPEKSHIGVWQKRAGARADSSWVMTVELNKDTAVSSAATVAAATAVSSSDQPTPSDSTVTTTSTSTTGSPSPPPPAMDDEERIALQMIEELLGRSGPGSPSHGLLHGGEGSLVI

SEQ ID NO: 643 - protein, 446 aa, Zea mays
MAATRRAFFHSAVDGIARAGPGEAERLPAPPQVGRPVEGASSMVLGFPVPRPTMPDRRPAAVTQQFFPPTTTAAQQATMEEQCHVPAGSAAEQWVRSSASRKSRRGPRSRSSQYRGVTFYRRTGRWESHIWDCGKQVYLGGFDTAQAAARAYDQAAIKFRGLNADINFTLDDYKDEMKKMKDLSKEEFVLVLRRQGAGFVRGSSRFRGVTQHKCGKWEARIGQLMGKKYVYLGLYDTETEAAQAYDKAAIKCYGKEAVTNFDAQSYDKELQSQPWDGELDLELSLGCASSDPSTVAVEAFSPATSSSSRKQRTMTLTLGLPEEEETGAGYPHPAAGMFGRPADGHVHVAPPPHRQWQQQQQGQHAAPDAAPERRAAEPADRQRWGRGARWPIASASGINWAWAPPYATARAGTDDDDASSAAAAASSGFPLWQLGAASSRSSWPSC

SEQ ID NO: 644 - protein, 494 aa, Oryza sativa
MPGAAGYSGSVKLKYVKLGYQYLVNHFLTLLLVPVMAATALELARMGPGELLSLWRSLQLDLVHILCSVFLVVFVGTVYFMSRPRPVYLVDYSCYKPPPSCRVPFATFMEHTRLITDDEKSVRFQTRILERSGLGEETCLPPANHYIPPNPSMEASRAEAQLVIFSAIDDLVRRTGLKPKDIDILVVNCSLFSPTPSLSAMIINKYKLRSNIRSFNLSGMGCSAGLISLDLARDMLQVHPNSNALVVSTEIITPNFYWGTRRDMMLPNCLFRMGAAAILLSNRRREARRAKYRLMHVVRTHKGADDRAYRCVYEEEDEQGHSGISLSKELMAIAGDALKSNITTIGPLVLPMSEQLLFFFRLVGRKLINKKWKPYIPDFKLAFEHFCIHAGGRAVIDELQKNLDLSAQHVEASRMTLHRFGNTSSSSLWYELAYIEAKGRMRRGDRVWQIGFGSGFKCNSAVWKCLRTVKTPADGPWDDCIHRYPVDIPEVVKL

SEQ ID NO: 645 - protein, 213 aa, Zea mays
MTENLHSRKMVQPKKFRGVRQRHWGSWVSEIRHPLLKRRVWLGTFETAEEAARAYDEAAVLMSGRNAKTNFPIQRSSTGEPTPAAGRDARSNFSSGSSTTNLSQILSAKLRKCCKAPSPSLTCLRLDPEKSHIGVWQKRAGARADSNWVMTVELNKDAASTDAASQSTSATTAPPATPMDEEERIALQMIEELLSSSSPASPSNGDDQGRFII

SEQ ID NO: 646 - protein, 650 aa, Zea mays
MSRDLDCPVQTQMAVAVLDRSFSSEYPGGSRIEGRQLSWKRVFVQTDNGSVLGIELERGENVQTVKKKLQIALNVPTDESSLTFGDLVLNNDLSSIRNDSPLFLKRNQIHRSNSTPCLSPTGKNVLQRDRSGPIEILGCSSPSSRMKQLAKDVIKAIMNDVDPVAVNSGMGGAYYFKNIWGERVAIVKPTDEEPFAPNNPKGFVGKALGQPGLKRSVRVGETGFREVAAYLLDYGHFANVPPTMLVKITHTIFNVNDCVGCKSKVFCNKSEAVSKIASLQEFIPHDFDASDHGTSSFPVSAVHRIGILDIRIFNTDRHAGNLLVKKLGPGADNFGEQTELIPIDHGLCLPECLEDPYFEWIHWPQASVPFSEEELEYIARLDPVKDAEMLRMELPMIRDACLRVLVLSTVFLKEAAASGLCLSEIGDMMSRQFTAKEEEPSQLELLCMEARKWVEERESFLPNEAGVEDDDDDFTQFLIDGEDDYPDALEPSAFCKFGSMKASSRNPLSKLDERDEEDGDGTEEDDDDDILTGALPQRISSISKLSSSMKGLGFIGKPKPYRTCLRKGKATGRTKYTGKASEHQSGSRSANELLPPSASFVKLSDMSPKQWSAFLDKFQELLPGALSARKHAAGVVGQRSMPRLGTSCQF

SEQ ID NO: 647 - protein, 472 aa, Zea mays
MSSARVRGPFTPPQWIELEHQALIYKYLSANSPVPHSLLVPIRRSGSLASSPYPPPYFGTSTFGWGSFQLGYSGNADLEPGRCRRTDGKKWRCSRDAVADQKYCERHMNRGRHRSRKHVEDQPGHAAKAMSAVAVAAAAAAATQHAAALAGAGATAAAGLAVNRHRQPGKSYATGATDPCSLQYSRELANKLSNESENMQDSDNVSMLTSMNTGNTAGSVFPFSKQNTALFEVSSSRPEFGLVPSDSLTSSPHSSLKSVKNLLSSRSLSEHQSSASLQHFVDWPRTPPAQGGLSWPEAEDMPRAQRSQLSVSAPMASSELSSASTSPIHDHEKLILSPLKLGREYTPSGVVSAAANRYEVSQLEATWATMFRDSSTGGPLGEVLAKNNSNAEARGCPSAAPPLTDYYCWDSGHGMQSSPVGVLQRTTAFGSVSSSTGSSPRVENHGACCDGTSNLMDDLGSVVVRHPSIRLL

SEQ ID NO: 648 - protein, 396 aa, Oryza sativa
MMMMSGRPSGGAGGGRYPFTASQWQELEHQALIYKYMASGTPIPSDLILPLRRSFLLDSALATSPSLAFPPQPSLGWGCFGMGFGRKAEDPEPGRCRRTDGKKWRCSKEAYPDSKYCEKHMHRGKNRSRKPVEMSLATPPPPSSSATSAASNSSAGVAPTTTTTSSPAPSYSRPAPHDAAPYQALYGGPYAAATARTPAAAAYHAQVSPFHLHIDTTHPHPPPSYYSMDHKEYAYGHATKEVHGEHAFFSDGTEREHHHAAAGHGQWQFKQLGMEPKQSTTPLFPGAGYGHTAASPYAIDLSKEDDDEKERRQQQQQQQQHCFLLGADLRLEKPAGHDHAAAAQKPLRHFFDEWPHEKNSKGSWMGLEGETQLSMSIPMAANDLPITTTSRYHNDE

SEQ ID NO: 649 - protein, 369 aa, Zea mays
MEGGRDVFLGAAARAPPPPPSCPFHGSATATRSGGAQMLSFSSNGVAGLGLCSGASKMQGVLSRVRRPFTPTQWMELEHQALIYKHFAVNAPVPSSLLLPIKRSLNPWSSLGSSSLGWAPFRSGSADAEPGRCRRTDGKKWRCSRDAVGDQKYCERHIKRGCHRSRKHVEGRKATPTTADPTMAVSGGSLLHSHAVAWQQQGKSSAANVTDPFSLGSNRNLLDKQNLGDQFSVSTSMDSFDFSSSHSSPNQAKVAFSPVAMQHEHDQLYLVHGAGSSAENVNKSQDGQLLVSRETIDDGPLGEVFKGKSCQSASADILTDHWTSTRDLRPPTGVLQMSSSNTVPAENHTSNSSYLMARMANSQTVPTLH

SEQ ID NO: 650 - protein, 621 aa, Zea mays
MSPNLDSAIKSQVPALLLRRLFGASRRDEAKQLQRTPAPVGRRRVFVQTETGCVLGMDLDRGDNAHTVKRRLQLAFNMPTGGTSLTFGDRVLENDLSFLRPDSPLLLTRNSINRSCSTPCLCPVSKDFEHKDCSGLVEMLGCSSSCARVKRLVDDVVTAIRSGVDPVPISSGLGGSYYFRNVLGDRVAIVKPTDEEPFAPNNPKGFVGRALGQPGLKRSVRVGETGFREVAAFLLDHDNFANVPATALVKITHSIFNINCPVNGGNLAPAHDQQQQVNSKIASFQQFIAHDFDASDHGTSSFPVAAVHRIGILDIRIFNTDRHAGNVLVRKLNGGTGRFGCQTELFPIDHGMCLPENLEDPYFEWIHWAQASIPFSEEELEYIRNLDPRKDVQMLRRELPMIREACLHVLALCTIFLKEAAAFGLCLAEIGEMMTREFRGMEEEPSQLELMCMEARKRVAEWEPFSATAEHGEDTDFQFSVDMLGEYSDVVRSPRFNGSGSKVSSFRSPLSKLVESVDEGSDGHEDQNESDRVLYAGWNTSSVPSKAMGHSGNASKSAMNRSADEQLPSSMCFVRLSDMSADEWDVFLEKFQELLKETLHESARAAAGQRMKQRLGTSCKF

SEQ ID NO: 651 - protein, 264 aa, Nostoc PCC7120
MSSTLYRRQLLKLLGMSVLGTSFSSCVTSPARAKTVNWGYIGKVGPEHWGELSPDFALCQIGRKQTPIDLQIADVKDVHSSSQDLLVTNYQPTALHLINNGKTVQVNYQPGSYLKYAHQKFELLQFHFHHFSEHRVDGKLYDMELHLVHRSKSGDLAVMGIFLQAGAFNPTLQIIWDATPQNQGTDKRIEDINIDASQFLPAQHRFFTYSGSLTTPPCSENVLWCVMATPIEASPAQIAKFSQMFPQNARPVQPLNDRLVIEAI

SEQ ID NO: 652 - protein, 358 aa, Chlamydomonas reinhardtii
MSSDAMTINESLMEVEHTPAVHKRILDILPGISGGVARVMIGQPFDTIKVRLQVLGQGTALAAKLPPSEVYKDSMDCIRKMVKSEGPLSFYKGTVAPLVGNMVLLGIHFPVFSAVRKQLEGDDHYSNFSHANVLLSGAAAGAAGSLISAPVELVRTKMQMQRRAALAGTVAAGAAASAGAEEFYKGSLDCFKQVMSKHGIKGLYRGFTSTILRDMQGYAWFFLGYEATVNHFLQNAGPGVHTKADLNYLQVMAAGVVAGFGLWGSMFPIDTIKSKLQADSFAKPQYSSTMDCLKKVLASEGQAGLWRGFSAAMYRAIPVNAGIFLAVEGTRQGIKWYEENVEHIYGGVIGPATPTAAQ

SEQ ID NO: 653 - protein, 467 aa, Synechococcus PCC7942
MTVWQTLTFAHYQPQQWGHSSFLHRLFGSLRAWRASSQLLVWSEALGGFLLAVVYGSAPFVPSSALGLGLAAIAAYWALLSLTDIDLRQATPIHWLVLLYWGVDALATGLSPVRAAALVGLAKLTLYLLVFALAARVLRNPRLRSLLFSVVVITSLFVSVYGLNQWIYGVEELATWVDRNSVADFTSRVYSYLGNPNLLAAYLVPTTAFSAAAIGVWRGWLPKLLAIAATGASSLCLILTYSRGGWLGFVAMIFVWALLGLYWFQPRLPAPWRRWLFPVVLGGLVAVLLVAVLGLEPLRVRVLSIFVGREDSSNNFRINVWLAVLQMIQDRPWLGIGPGNTAFNLVYPLYQQARFTALSAYSVPLEVAVEGGLLGLTAFAWLLLVTAVTAVRQVSRLRRDRNPQAFWLMASLAGLAGMLGHGLFDTVLYRPEASTLWWLCIGAIASFWQPQPSKQLPPEAEHSDEKM

SEQ ID NO: 654 - protein, 310 aa, Chlamydomonas reinhardtii
MRSAVLQRGQARRVSCRVRADGSGVDSLPSTSASSSARPLIDRRQLLTGAAASVITFVGCPCPLCKPGEAKAAAWNYGEVAGPPTWKGVCATGKRQSPINIPLNTSAPKVDAEMGEFDFAYGSFEKCDVLNTGHGTMQVNFPAGNLAFIGNMELELLQFHFHAPSEHAMDGRRYAMEAHLVHKNKSTGNLAVLGIMLEPGGLIKNPALSTALEVAPEVPLAKKPSPKGINPVMLLPKKSKAGTRPFVHYPGSLTTPPCSEGVDWFVFMQPIKVPDSQILDFMRFVGDNKTYATNTRPLQLLNSRLVEYEL

SEQ ID NO: 655 - protein, 598 aa, Zea mays
MSEEDEDQPPAKRPSPSPPADQVLDNVLETVLQFLDAPRDRSAASLVCRSWHSAESATRESVAVRNLLAVSATRTARRFPNARSLLLKGRPRFADFNLLPHGWDASAFRPWAAAVAAGAFPALTSLYLKRIPVTDADLDLLSRSLPASFRDLTLHLCDGFTSRGLASIASHCRGLRVLDVVECDMAEEQEVVDWVAAFPQEPSNLESLSFECYEPPVAFAALEALVERSPRLRRLGVNLHVSLGQLCRLMAHAPRLSHLGTGSFRPADGGEEGTGFGEVVSAFVAAGRARTLVSLSGFRDLAQEYLPTIAVVCAHLKSLDLSYSAVTPNQILMFIGQCYNLETLWVLDSVRDEGLDAVGISCKKLQSLRVLPLNAHEDADELVSEVGLTAISRGCPALRSILYFCQTMTNAAVVDMSRNCPELKVFRLCIMGRHQPDHATGEPMDEGFGAIVQNCSKLTRLSTSGQLTDRAFEYIGRHGKSLRTLSVAFAGNSDVALQYILQGCPKLEKLEIRDCPFGDAGLFAGMHHFYNMRFVWMSGCNLTLQGCKEVAQVLPRMVVELINGQSDENERNESVDILYMYRSLDGPREDVPPFVKIL

SEQ ID NO: 656 - protein, 394 aa, Glycine max
MSDHLPREVLTEILSRLPVRSLLRFRSTSKSWKSLIDSQHLNWLHLTRSLTLASNTSLILRVDSDLYQTNFPTLDPPVSLNHPLMCYSNSITLLGSCNGLLCISNVADDIAFWNPSLRQHRILPYLPVPRRRHPDTTLFAARVCGFGFDHKTRDYKLVRISYFVDLHDRSFDSQVKLYTLRANAWKTLPSLPYALCCARTMGVFVGNSLHWVVTRKLEPDQPDLIIAFDLTHDIFRELPLPDTGGVDGGFEIDLALLGGSLCMTVNFHKTRIDVWVMREYNRRDSWCKVFTLEESREMRSLKCVRPLGYSSDGNKVLLEHDRKRLFWYDLEKKEVALVKIQGLPNLNEAMICLGTLVPPYFLPRQICRKPRALGCERPRKTRDDFLSQGFKLTL

SEQ ID NO: 657 - protein, 563 aa, Glycine max
MGQSVSSAAVASRRERDQGHRSVNSSKTRFTASVSPMAGYSSGAAEEGENHRVEAVADESTDYISDLPNECLASVFQFLSSADRSRCSLVCRRWLQIEGQSRHRLSLNAELDLFPAIPSLFSRFDSVTKLALKCDRRSVSIRDDALVLISQRCPNLTRLKLRACRELTDAGMEAFAKNCKGLKKLSCGSCTFGSKGMNAVLDNCAALEELSVKRLRGIADTAAAEPIGPGVAAASLKTVCLKELYNGQCFGTLILGAKNLKTLKLFRCSGDWDRLFQLLVDRVTKIVEVHLERLQISDVGLQAIANYSSLEILHLVKTPECSDIGLVAIADRCKLLRKLHIDGWKANRIGDEGLIAVAKGCPNLLELVLIGVNPTKASLEMLASNCQNLERLALCGSDSVGDPEISCIAAKCVALKKLCIKSCPVSDQGMEALGNGCPNLVKVKVKKCKGVTPEGGDWLRRTRGSVAVNLDTGEAELQEASASDGGAQDNGVEFPQMPAQIAAASSSTRSSSSRFALMSARISAAALRSTRSGSSRLGLLPTRISAASTFRRWSGGSTSARHG

SEQ ID NO: 658 - protein, 480 aa, Zea mays
MSFRSIVRDVRDGFGSLSRRSFEVTLASIYGLTGHHKGKTQSSSHVLDDSPSIIRESRWANLPPELIRDIIRRLEADESTWPARKHVVCFAAVCRTWREMCKEIVLSPEFCGKLTFPVSLKQPGPRDGNTMVQCFIKRNKSKSTYHLYLCLSNVVTSESGKFLLSAKRHRKTTCTEYTISMDSGNISRSKRTYIGKIRSNFLGTRFLIYDTQPPYNGAVVPPAGRTSRRFNSTKVSPKLPSVSYNIAQVSYELNVLGTRGPRRMRCIMHSIPASSVEPGGTVPGQPEQIVPRALEDSFRSTASFSQSFRSTASFSKSIMDSSMDFNSARFSDIAGSSARFTGVPGSSARFAGVPGSSARFSGIAGARLDNDEESETKERPLVLRNKPPRWHEQLQCWCLNFRGRVTIASVKNFQLIAAATPPPAGAPTPSQPAPSDPDKVILQFGKVARDMFTMDYRYPLSAFQAFAICLSSFDTKLACE

SEQ ID NO: 659 - protein, 251 aa, Zea mays
MQCFIKRNKNNSTFYLYLGFTSSPVDKGKFLMAARRFRRGPHTEYIISLDAEDLSQGSNAYMGKLRSDFWGTNFKIYDSKPPYDGAKASSSRSSRRFGSRRISPQVSAGNYEVGQVSYKYNLLKSRGPRRMYCTLECPSAQETWENSLKTKFRRPLGPTTLRNKAPRWHEHLQCWCLNFHGRVTVASVKNFQLVAAADPSEPTTNVDDETVLLQFGKVDSDMFTMDYRQPLSAFQAFAISLSSFGTKLACE

SEQ ID NO: 660 - protein, 454 aa, Glycine max
MASSRPANVGILAMDIYFPPTCVTQDALEGHDGVSKGKYTIGLGQDCMAFCSEVEDVISMSLTVVTSLLEKFNVDPKQIGHLAVGSETVIDKSKSIKTFLMQVFEASGNTDIEGVDSTNACYGGTAALFNCVNWVESSSWDGRYGLVVCTDTAVYAEGPARPTGGAAAIAMLVGPDAPIAFESKLRGSHMSHAYDFYKPNLASEYPIVDGKLSQTCYLMALDSCYRLYCEKFEKLEGRPFSMSDSDYFVFHSPYNKLVQKSFGRLYFNDFLRNASFVDEVARETLAPYASLSGDESYQSRDLEKANQQAAKHLYDAKVQPSTLIPKQVGNMYTASLYAAFASLLHNKNSSLVGKRVVMFSYGSGLTATMFSFQLQEGQHPFNLSNIVTVMNVSDKLKQRVEIPPEKFVETLKIMEHRYGGKDFVTSKDCSYLTPGTFYLTNVDSMYRRFYAKKD

SEQ ID NO: 661 - protein, 491 aa, Saccharomyces cerevisiae
MKLSTKLCWCGIKGRLRPQKQQQLHNTNLQMTELKKQKTAEQKTRPQNVGIKGIQIYIPTQCVNQSELEKFDGVSQGKYTIGLGQTNMSFVNDREDIYSMSLTVLSKLIKSYNIDTNKIGRLEVGTETLIDKSKSVKSVLMQLFGENTDVEGIDTLNACYGGTNALFNSLNWIESNAWDGRDAIVVCGDIAIYDKGAARPTGGAGTVAMWIGPDAPIVFDSVRASYMEHAYDFYKPDFTSEYPYVDGHFSLTCYVKALDQVYKSYSKKAISKGLVSDPAGSDALNVLKYFDYNVFHVPTCKLVTKSYGRLLYNDFRANPQLFPEVDAELATRDYDESLTDKNIEKTFVNVAKPFHKERVAQSLIVPTNTGNMYTASVYAAFASLLNYVGSDDLQGKRVGLFSYGSGLAASLYSCKIVGDVQHIIKELDITNKLAKRITETPKDYEAAIELRENAHLKKNFKPQGSIEHLQSGVYYLTNIDDKFRRSYDVKK

SEQ ID NO: 662 - protein, 233 aa, Zea mays
MALRTLASKNALSFALGGAARPSAASARGVTTVALPDLSYDFGALEPAISGEIMRLHHQKHHATYVANYNKALEQLDAAVAKGDASAVVQLQGAIKFNGGGHVNHSIFWKNLKPISEGGGEPPHGKLGWAIDEDFGSFEALVKRMNAEGAALQGSGWVWLALDKEAKKLSVETTANQDPLVTKGASLVPLLGIDVWEHAYYLQYKNVRPDYLNNIWKVMNWKYAGEVYENVLA

SEQ ID NO: 663 - protein, 193 aa, Arabidopsis thaliana
MSFELPALPYAKDALAPHISAETIEYHYGKHHQTYVTNLNNLIKGTAFEGKSLEEIIRSSEGGVFNNAAQVWNHTFYWNCLAPNAGGEPTGKVAEAIAASFGSFADFKAQFTDAAIKNFGSGWTWLVKNSDGKLAIVSTSNAGTPLTTDATPLLTVDVWEHAYYIDYRNARPGYLEHFWALVNWEFVAKNLAA

SEQ ID NO: 664 - protein, 201 aa, Arabidopsis thaliana
MSYELPALPFDYTALAPYITKETLEFHHDKHHAAYVNNYNNAVKDTDLDGQPIEAVIKAIAGDASKAGLFNNAAQAWNHSFYWNSIKPNGGGAPTGALADKIAADFGSFENFVTEFKQAAATQFGSGWAWLVLDNGTLKITKTGNADTPIAHGQTPLLTIDVWEHAYYLDYQNRRPDYISTFVEKLANWDFASANYAAAIA

SEQ ID NO: 665 - protein, 492 aa, Zea mays
MDPYKHRPSSGSNSSFWTTNSGAPVWNNNSALTVGQRGPILLEDYHLIEKLAQFDRERIPERVVHARGASAKGFFEVTHDVSHLTCADFLRAPGVQTPVIVRFSTVVHERGSPETLRDPRGFAVKFYTREGNFDLVGNNMPVFFIRDGMKFPDMVHAFKPNPKTNLQENWRIVDFFSHHPESLHMFTFLFDDVGIPLNYRHMEGFGVNTYTLINRDGKPHLVKFHWKPTCGVKCLLDNEAVTVGGTCHSHATKDLYDSIAAGNYPEWKLYIQTIDLDHEDKFDFDPLDVTKTWPEDIIPLQPVGRMVLNKNVDNFFAENEQIAFCPAIIVPGIHYSDDKLLQTRIFSYADTQRHRLGPNYLMLPVNAPKCAHHNNHHDGFMNFMHRDEEVNYFPSRFDPARHAEKVPIPPRVLTGCREKCIIQKENNFKQAGERYRSFDPARQDRFIQRWVDALTDPRVTHEHRTIWISYWSQCDAALGQKLASRLNLKPSM

SEQ ID NO: 666 - protein, 494 aa, Zea mays
MDPTKFRPSSSHDTTVTTTNAGAPVWNDNEALTVGPRGPILLEDYHLIEKVAHFARERIPERVVHARGASAKGFFECTHDVTSLTCADFLRAPGVRTPVIVRFSTVIHERGSPETIRDPRGFAVKFYTREGNWDLLGNNFPVFFIRDGIKFPDVIHAFKPNPRSHVQEYWRVFDFLSHLPESLHTFFFLFDDVGVPSDYRHMEGFGVNTYTFVSAAGKAQYVKFHWKPTCGVRCILTDEEAALVGGRNHSHATQDLYDSIAAGSFPEWTLYVQVMDPDTEEQYDFDPLDDTKTWPEDLLPLRPVGRLVLDRNVDNFFNENEQLAFGPGLVVPGIYYSDDKMLQCRVFAYADTQRYRLGPNYLMLPVNAPRCAHHNNHYDGAMNFMHRDEEVDYYPSRHAPLRQAAPPTPLPPRPVAGRREKATIRKPNDFKQPGERYRSWDADRQDRFVRRFADSLGHPKVSQELRSIWIDLLAKCDASLGMKIATRLNMKPNM

SEQ ID NO: 667 - protein, 289 aa, Zea mays
MAAPMVDAEYLRQVDRARRHLRALISNKGCAPIMLRLAWHDAGTYDLKTKTGGANGSIRYEEEYTHGSNAGLKIAIDLLEPIKAKNPKITYADLYQLAGVVAVEVTGGPTVEFIPGRRDSSVCPREGRLPDAKKGAPHLRDIFYRMGLSDKDIVALSGGHTLGRAHPERSGFDGAWTKEPLKFDNSYFLELLNEESEGLLKLPTDKALLSDPEFRRYVELYAKDEDAFFKDYAESHKKLSELGFTPRSTAPSKSDLPTAAVLAQSAFGVAVAAAVVIAGYLYEASKKAK

SEQ ID NO: 668 - protein, 447 aa, Zea mays
MDEEYDVIVLGTGLKECIISGLLSVDGLKVLHMDRNDYYGGESSSLNLTKLWNRFKGNDSPPEHLGVSKEYNVDMVPKFMMANGALVRVLIRTSVTKYLNFKAVDGSFVYNNGKIHKVPATDVEALKSNLMGLFEKRRARKFFIYVQDYEEDDPKSHEGLDLNKVTTREVISKYGLEDDTVDFIGHALALHRDDSYLDEPAIDTVKRMKLYAESLARFQGGSPYIYPLYGLGELPQAFARLSAVYGGTYMLNKPECKVEFDESGKAYGVTSEGETAKCKKIVCDPSYLPDKVKKVGRVARAICIMKHPIPDTKDSHSVQIILPKKQLKRKSDMYVFCCSYAHNVAPKGKFIAFVSTEAETDKPEIELKPGIDLLGPVEETFFDIYDRYEPVNNPDDDCCFLTNSYDSTTHFETTVKDVLALYNKITGKELDLSVDLNAASATEQEAA

SEQ ID NO: 669 - protein, 458 aa, Glycine max
MDEEYDVIVLGTGLKECILSGLLSVDGLKVLHMDRNDYYGGESTSLNLIQFELRNDDFLCPPLQLWKRFRGDDKPPPHLGASRDYNIDMNPKFIMANGNLVRVLIHTDVTKYLYFKAVDGSYVFNKGKVHKVPANDMEALKSPLMGLFEKRRARKFFIYVQNYNESDPKTHEGMDLTRVSTKELIAKYGLDDNTIDFIGHALALHSDDRYLAEPALDTVKRMKLYAESLARFQGGSPYIYPLYGLGELPQAFARLSAVYGGTYMLNKPECKVEFDEEGKVVGVTSEGETAKCKKVVCDPSYLPGKVRKVARVARAIAIMSHPIPSTDDSHSVQIILPQKQLGRKSDMYLFCCSYTHNVAPKGKFIAFVSTEAETDQPAIELKPGIDLLGPVDEIFFDIYDRYEPVNEPTLDNCFISTSYDATTHFESTVDDVLNMYTLITGKVIDLSVDLSAASAAEE

SEQ ID NO: 670 - protein, 247 aa, Zea mays
MSSAVEAISCPKVDVPAGPEPGEPAKEAAPPAEHCDTAPNGKCAPRCHGEEEEEEEDEEDEEKAPKAIDLGPMVSIKEQLEKDKDDESLRRWKEQLLGGVDLNSVGETLEPDVKIMSLSILSPGRPDIVLPLPVEPNGKGVWFTLKEGSPYRLKFTFSVSNNIVSGLRYTNTVWKTGLKVDRAKEMLGTFSPQLEPYTYVTPEDTTPSGMFARGSYSARTKFLDDDRKCYLEINYTFDIRREWPSTS

SEQ ID NO: 671 - protein, 132 aa, Zea mays
MAQVRGSARGTGSGSSAAALALVLLCALLRGEFAESAVYTVGDRGGWSFNTASWPNGKRFRAGDVLVFRYDARAHNVVPVSAAGYSSCSAPEGARALATGNDRVTLRRGANYFICSFPGHCQAGMKVAVTAA

SEQ ID NO: 672 - protein, 127 aa, Zea mays
MAEGRGSARAIGAMAFAVACCYCCVAIADAATTYYVGDSNGWSFSSPSWPNGKHFRAGDTLVFRYIPWIHNVVAVDEDGYNGCTTPPGSRTYTSGADSVTLARGDNFFICTRFGHCNLGMKLVVYAA

SEQ ID NO: 673 - protein, 127 aa, Glycine max
MSQGRGSASLPIVVTVVSLLCLLVLLERADAATYTVGGPGGWTFNTNAWPKGKRFRAGDILIFNYDSTTHNVVAVDRSGYNSCKTPGGAKVFSSGKDQIKLARGQNYFICNYPGHCESGMKVAINAV

SEQ ID NO: 674 - protein, 182 aa, Zea mays
MLCPCMHHVLVYNVSGTFVRSSACISQYLVKEKSSDPARPAGSCVAAFQYSSAHSVLEVSEADHGACSASNPLRSHQGQSTTIPLTKAGTRYFICGAPGHCASGMKVAITVSGGGGGGSSSADNTATPSGPSVRAMNTKPAFGLRSGGATTTDESDSSAAGSGARLAMGLLFGAAGLAAIMG

SEQ ID NO: 675 - protein, 195 aa, Zea mays
MAATSRLALALLLAALVAAWQLPAAAVAANYTVGDEKGWNPDVDYTAWVKKHKPFYKGDWLIFEYQNGRSDVVQVDEVGYDNCDKANALSSYSKGHTYAFQLKDAKDYYFICSYGYCYNGMKLHVTAKSSSSSSSSSSGSDSSSSSSDDDSSSPSPPAKKSKAKTSAAPPPSLLAATPMAAAAAAAAALLLNRML

SEQ ID NO: 676 - protein, 350 aa, Zea mays
MERERQAVARNRKVVLRGYIDRAPREEDMELVDGGAVELRVPEGGGGPAVLVKNLYLSCDPYMRGRMRDFRNSYIPPFKPGSPIEGFGVGRVVDSTHPGFSAGDVVSGMTGWEDYSLITKPEQLRKIQQSDIPLSYHLGLLGMPGFTAYVGFYEICSPKKGEFVFVSAASGAVGQIVGQLAKLHGCYVVGSAGTDQKVELLKEKFGFDAAFNYKEEPDLTAALKRHFPEGIDIYFENVGGPMLDAVLLNMRVHGRIAVCGMVSQHGVTAPAGIHNLFSLISKRIEMKGFIQSDYVHLFPQFVDDITRHYRDGKIVYVEDMSVGLESGPASFVGLFSGKNVGKQVVCVSRD

SEQ ID NO: 677 - protein, 342 aa, Glycine max
MTQVRNKQVVLRDYVTGFPKESDMNIVEGTIILKVPEGSNDVLLKNLYLSCDPYMRLLMAKDRSFGDGSFTLASPLKGYGVSQVLESGRPDYKKGDLVWGITKWEEYSLVPSSLIHFKIEHTDVPLSYYTGILGMPGMTAYAGFFEVGSPKKGDTVFVSAASGAVGQLVGQFAKLTGCYVVGSAGSKEKVDLLKNKLGFDEAFNYKEEPDLNAALKRYFPEGIDIYFENVGGKTLDAVLPNMKFHGRIPVCGMISQYNLTQFDGVTNLANLIFKRVKMEGFIATDFYHLYPKFLEFVLPHIREGKVVYVEDIAEGLEKGPAALVGLYTGRNVGKQVVVVTHE

SEQ ID NO: 678 - protein, 358 aa, Zea mays
MATTATNRRVILKEYVEGYPREEHMELLQGAEVPLRLTGAEPAGSVLVRNLYLSCDPYMRPKMSRPLRESYTAAFVPGDTITGYGVARVVDSSDPRLAPGDLVWGITGWEDYSVVTPPATRLLSKISHHGVGEGAGVPLSYYTGILGMPGLTAYVGFHEICAPKKGETVFVSAASGAVGQLVGQFARLAGCHVVGSAGSREKVELLKTRFGFHDAFNYKEEPDLGAALKRCFPDGIDIYFENVGGAMLDAVLLNMRVHGRIAVCGLISQYNLADGEKDAVRNLAAVISKRLRLQGFIEPDHKHLYPQYEAWVLPYIRDGTLAYVEDVAEGLESAPKALIGLFHGRNVGKQLVRVADDE

SEQ ID NO: 679 - protein, 335 aa, Zea mays
MADLIKAVDIRGGKGERDALFINPQTPKPSPTEGQALVRVKAFGINRMDIVQRRGFYPLPPQAPATLGVEFSGTIESLGPGDHGAFKQGDEVFGLAYGGAYAEYLAVSTRMLLHKPSSMDFVTCAGIPETWITATQALHLVLGFTKGKSILWHAGASGVSIAGIQLSKIAGASQVFATAGSQEKCDFITSKLGATAAFNYKTQDWAEEIKKHTDGNGVDYIVDFVGASYFQQNQTAAARDGRIVLLGTLGGVKIPEADISQILYKRLRIEGSTLRSRDEEYQGKLRDRLEEYLPDFESGKLKILVDKVLPWEEIQEAHKHMEEAKNLGKIICTIS

SEQ ID NO: 680 - protein, 525 aa, Aspergillus nidulans
MSPLNGVARSFPRPFQAVTRRPFRVVQPAIACPSNSRSFNHSRSLRSTGSQSPAPSPRDSSNPALSFPCLDAQEAKSALLSARSLGSGPEPSYTAGHHERFHSDEPLLLDWGGLLPEFDIAYETWGQLNEKKDNVILLHTGLSASSHAHSTEANPKPGWWEKFIGPGKTLDTDKYFVICTNVLGGCYGSTGPSTVDPSDGKKYATRFPILTIEDMVRAQFRLLDHLGVRKLYASVGSSMGGMQSLAAGVLFPERVGKIVSISGCARSHPYSIAMRHTQRQVLMMDPNWARGFYYDSIPPHSGMKLAREIATVTYRSGPEWEKRFGRKRADPSKQPALCPDFLIETYLDHAGEKFCLEYDANSLLYISKAMDLFDLGLTQQLATKKQRAEAQAKISSGTNTVNDASCSLTLPEQPYQEQPSASTSAEQSASASETGSAPNDLVAGLAPLKDHQVLVIGVASDILFPAWQQREIAETLIQAGNKTVEHIELGNDVSLFGHDTFLLDVRTSEAQFASSVLVGSHIIVQ

SEQ ID NO: 681 - protein, 249 aa, Synechocystis PCC6803
MLNSLIADFRIIFERDPAARNWLEVLFCYPGLQALLIHRFSHRLYTLGLPFFPRLMSHLARFFTGIEIHPGAQIGQGVFIDHGMGVVIGETAIVGDYSLIYQGVTLGGTGKESGKRHPTLGENVVVGAGAKVLGNIAIGDNVRIGAGSVVLRDVPADFTVVGVPGRMVHPSGERVNPLEHGKLPDSEGKVIRLLLERIELLEQQVATLQQQQSEQAWESDYRSCSETDREPVLCRLGDREIEEFLGGTL

SEQ ID NO: 682 - protein, 200 aa, Synechocystis PCC6803
MTEVLRVGQPAPDFTATAIVDQSFQTVKLSTYRGKYLVLFFYPLDFTFVCPTEIIAFSDRHSEFTALDTEVVGISVDSEFSHLAWIQTERKMGGIGNINYPLVSDLKKEISQAYNVLEPDAGIALRGLFIIDREGILQYATVNNLSFGRSVDETLRVLKAIRHVQSHPNEVCPVDWQEGDKTMIPDPEKAKTYFETVAEP

SEQ ID NO: 683 - protein, 196 aa, Saccharomyces cerevisiae
MVAEVQKQAPPFKKTAVVDGIFEEISLEKYKGKYVVLAFVPLAFSFVCPTEIVAFSDAAKKFEDQGAQVLFASTDSEYSLLAWTNLPRKDGGLGPVKVPLLADKNHSLSRDYGVLIEKEGIALRGLFIIDPKGIIRHITINDLSVGRNVNEALRLVEGFQWTDKNGTVLPCNWTPGAATIKPDVKDSKEYFKNANN

SEQ ID NO: 684 - protein, 261 aa, Saccharomyces cerevisiae
MFSRICSAQLKRTAWTLPKQAHLQSQTIKTFATAPILCKQFKQSDQPRLRINSDAPNFDADTTVGKINFYDYLGDSWGVLFSHPADFTPVCTTEVSAFAKLKPEFDKRNVKLIGLSVEDVESHEKWIQDIKEIAKVKNVGFPIIGDTFRNVAFLYDMVDAEGFKNINDGSLKTVRSVFVIDPKKKIRLIFTYPSTVGRNTSEVLRVIDALQLTDKEGVVTPINWQPADDVIIPPSVSNDEAKAKFGQFNEIKPYLRFTKSK

SEQ ID NO: 685 - protein, 215 aa, Saccharomyces cerevisiae
MGEALRRSTRIAISKRMLEEEESKLAPISTPEVPKKKIKTGPKHNANQAVVQEANRSSDVNELEIGDPIPDLSLLNEDNDSISLKKITENNRVVVFFVYPRASTPGCTRQACGFRDNYQELKKYAAVFGLSADSVTSQKKFQSKQNLPYHLLSDPKREFIGLLGAKKTPLSGSIRSHFIFVDGKLKFKRVKISPEVSVNDAKKEVLEVAEKFKEE

SEQ ID NO: 686 - protein, 176 aa, Saccharomyces cerevisiae
MSDLVNKKFPAGDYKFQYIAISQSDADSESCKMPQTVEWSKLISENKKVIITGAPAAFSPTCTVSHIPGYINYLDELVKEKEVDQVIVVTVDNPFANQAWAKSLGVKDTTHIKFASDPGCAFTKSIGFELAVGDGVYWSGRWAMVVENGIVTYAAKETNPGTDVTVSSVESVLAHL

SEQ ID NO: 687 - protein, 162 aa, Zea mays
MAPIAVGDALPDGQLGWFDENDQLQQVSVHALAAGKKVILFGVPGAFTPTCSNQHVPGFITQAEQLKAKGVDEILLISVNDPFVMKAWAKTYPENKHVKFLADGSGAYTKALDLELDLTDKGLGVRSKRFALLADDLTVTVANIEEGGQFTISGAEEILKAL

SEQ ID NO: 688 - protein, 260 aa, Glycine max
MACSATSASLFSANPTPLFSPKPSLSLHLNPLPTRPSPSLTRPSLSLTRPSHSRRSFVVKASSSELPLVGNTAPDFEAEAVFDQEFINVKLSDYIGKKYVVLFFYPLDFTFVCPTEITAFSDRHAEFEALNTEILGVSVDSVFSHLAWIQTDRKSGGLGDLNYPLISDVTKSISKSYGVLIPDQGIALRGLFIIDKEGVIQHSTINNLAIGRSVDETKRTLQALQYVQENPDEVCPAGWKPGEKSMKPDPKLSKDYFAAV

SEQ ID NO: 689 - protein, 214 aa, Glycine max
MASLTVPNHCVPTLLRTHSLNYPSSQNLPLPSAPSNSQFFGLKLSHSSFSTIPSSSSSLKGSIFAKVTKGSKPPNFTLKDQNGKNVSLSNFKGKPVVVYFYPADETPGCTKQACAFRDSYEKFKKAGAVVVGISGDDAASHKAFASKYKLPFTLLSDEGNKVRKEWGVPGDFFGSLPGRETYVLDKNGVVQLVYNNQFQPEKHIGETLKILQSL

SEQ ID NO: 690 - protein, 240 aa, Zea mays
MAAAPFAIAGRLSPVARLPVRAWRPAHGFASSGRARSLAVASAAQENRDNSVDVQVSQNGGNRQQGNAVQRRPRRATALDISPSPFGLVDPMSPMRTMRQMLDTMDRLFDDAVGFPMGTRRSPATTGDVRLPWDIVEDEKEVKMRIDMPGLARDEVKVMVEDDTLVIRGEHKKEEGAEGGSGGDGDGWWKQRSVSSYDMRLALPDECDKSKVRAELKNGVLLVTVPKTEVERKVIDVQVQ

SEQ ID NO: 691 - protein, 218 aa, Zea mays
MASIVASRRAVPLVRALEKLIAASSAPGTGSALRPVAVAGGLRGYNTGAPLRRYEGAESEDDSVREYDGRHGGRDYAVPSLFSDIFRDPLSAPHSIGRLLNLMDDLAVAAPGRAVRRGWNAKEDEEALHLRVDMPGLGKEHVKVWAEQNSLVIKGEGEKEDSEDEAAPPPRYSGRIELAPEVYRMDKIKAEMKNGVLKVVVPKVKEQQRKDVFQVNVE

SEQ ID NO: 692 - protein, 208 aa, Zea mays
MSRRAAALLLACLVAVTAAALADGALLPWFGDGRRGLDEAAVTDVGLLAADPFRILEHVPFGFDRDDVAMVSMARVDWRETPDAHEIVVDVPGMRREDLRIEVEDNRVLRVSGERRRAEERKGDHWHREERSYGRFWRRFRLPENADLDSVAASLDSGVLTVRFRKLAPEQIKGPRVVGIAGGDGGAEAKESIGTGAGDGHQTKKVEL

SEQ ID NO: 693 - protein, 221 aa, Zea mays
MGPYSTAVAVSASPVLQASSLLTRARGSWRPTVAALRLSASVKCRRRALTVTCALPEKERPAAFNIPPTALLCPVPPPDGKERWDIKEEDDRVTLWLQVPGLSASDIEVTTSEDVLEIKRRVVAPQQPAPVDAHGVGAFHIRLLLTKEYDGSNVTADLKAGMLEVTVHKNPQRPGERAVMMGATKPPPEPRQNEESSTNQRSSTARKETGTPMGRQNPNGV

SEQ ID NO: 694 - protein, 165 aa, Zea mays
MDGRMFGLETPLMVALQHLLDVPDGDAGAGGDKASGAAAGGGPTRTYVRDARAMAATPADVKELPGAYAFVVDMPGLGTGDIRVQVEDERVLVISGERRREEREDAKYLRMERRMGKFMRKFVLPDNADMDKISAVCRDGVLTVTVEKLPPPEPKKPKTIEVKVA

SEQ ID NO: 695 - protein, 154 aa, Zea mays
MSLVRRGSVFDPFSVDLFDPFDSVFRSIVPSSSSAAAASETAAFASARIDWKETPEAHVFKADLPGVKKEEVKVEVEDGNVLLISGQRSREKEDKGDKWHRVERSSGQFVRRFRLPENAKTEEVRAALENGVLTVTVPKAEVKKPEVKSIQISG

SEQ ID NO: 696 - protein, 208 aa, Zea mays
MSTVTSCTFLSLGSPVRPAVSSARPAAAAVASRRRPRSLSVCCEAGRKGDHNPKTDLHPFNIPAFVLVHPVAPREERWQLEEDADKVNLWFEVPGQSKDDLTVEIDEDVLVIKKRKELVGQRSPAGGGVAEYGSQSQQQSRRGTADGKELPAAQQGQAGEVVYARMLLPAGYSRDGVQAELKSGVLRVTVVKVTERARRKIDVPIQVK

SEQ ID NO: 697 - protein, 799 aa, Saccharomyces cerevisiae
MSTIYRESDSLESEPSPTPTTIPIQINMEEEKKDAFVKNIDEDVNNLTATTDEEDRDPESQKFDRHSIQEEGLVWKGDPTYLPNSPYPEVRSAVSIEDDPTIRLNHWRTWFLTTVFVVVFAGVNQFFSLRYPSLEINFLVAQVVCYPIGRILALLPDWKCSKVPFFDLNPGPFTKKEHAVVTIAVALTSSTAYAMYILNAQGSFYNMKLNVGYQFLLVWTSQMIGYGAAGLTRRWVVNPASSIWPQTLISVSLFDSLHSRKVEKTVANGWTMPRYRFFLIVLIGSFIWYWVPGFLFTGLSYFNVILWGSKTRHNFIANTIFGTQSGLGALPITFDYTQVSQAMSGSVFATPFYVSANTYASVLIFFVIVLPCLYFTNTWYAKYMPVISGSTYDNTQNKYNVTKILNEDYSINLEKYKEYSPVFVPFSYLLSYALNFAAVIAVFVHCILYHGKDIVAKFKDRKNGGTDIHMRIYSKNYKDCPDWWYLLLQIVMIGLGFVAVCCFDTKFPAWAFVIAILISLVNFIPQGILEAMTNQHVGLNIITELICGYMLPLRPMANLLFKLYGFIVMRQGLNLSRDLKLAMYMKVSPRLIFAVQIYATIISGMVNVGVQEWMMHNIDGLCTTDQPNGFTCANGRTVFNASIIWSLPKYLFSSGRIYNPLMWFFLIGLLFPLAVYAVQWKFPKFKFAKHIHTPVFFTGPGNIPPSTPYNYSLFFAMSFCLNLIRKRWRAWFNKYNFVMGAGVEAGVAISVVIIFLCVQYPGGKLSWWGNNVWKRTYDNDYKKFYTLKKGETFGYDKWW

SEQ ID NO: 698 - protein, 520 aa, Zea mays
MAAAPPPKADELQPFPPKEQLPGVAFCITSPPPWPEAILLGFQHFVVMLGTTVIIPSALVPQMGGGNEEKARVVQTILFVAGINTLFQTLFGTRLPVVMGGSYVFVGPTISIVLAGRYSNEADPHEGALLVASTIQIILGFSGLWRNVVKLLSPLAAVPLVSLVGFGLYELGFPGVAKCVEVGLPELLLLVVFSQYLPQVLDFGKSVFSRFSVLFTVAIVWLYAYILTIGGAYKNSPPKTQVHCRVDRSGLISGAPWISVPYPFQWGAPTFDAGEAFAMMMTSFIALVESTGAFIGASRYASATMIPPSIISRGVGWQGIGLLLDSFFGTANGTSVSVENIGLLALTRIGSRRVVQISAGFMIFFSVLGKFGALFASIPLPVFAGMYCLFFAYVGGVGLSLLQFCNLNSFRTKFIMGFAFFMGLSVPQYFNEYTAVASYGPVHTGARWFNDMINVPFTSKPFVAGLVAYILDNTLQVKESAVRKDRGNHWWEKFRSFKKDARSQEFYSLPFNLNKFFPSV

SEQ ID NO: 699 - protein, 533 aa, Zea mays
MAGGGAATPPKQEELQPHPVKDQLPSVSYCITSPPPWPEAVILGFQHYIVMLGTSVIIPSALVPQMGGGNEEKARVIQTLLFVAGINTLCQSFFGTRLPAVMGGSYTIVAPTISIIMAGRYSNEADPREKFLRTMRGTQGALIIASTIQIVLGFSGLWRNVVKLLSPLSAVPLVSLAGFGLYELGFPGVAKCVEIGLPEIILMLIFSQYLPHAVHAAKPVFDRFSVIFTIAIVWLYAYILTVSGAYKNARTKTQLHCRVDRSGLVGGAPWISVPYPFQWGAPTFDAGESFAMMVAAFVALVESSGAFIAVSRYASATMIPPSVLGRGIGWQGIGTLLGAFFGTANGTAVSVENAGLLALTHVGSRRVVQISAGFMIFFSVLGKFGAIFASIPLPIFAALYCILFAYIGACGLSFLQFCNLNSFRTKFIMGFSLFMGLSVPQYFNEYTSVAGYGPVHTGARWFNDMINVPFSSKPFVAVLVAFLLDNTIQVRDSGVRRDRGYHWWDKFRSFKTDSRSEEFYSLPFNLNKFFPSV

SEQ ID NO: 700 - protein, 887 aa, Zea mays
MWNPLSWVMEMAAIMAIALANGGGKPPDWQDFVGIIVLLVINSTISFIEENNAGNAAAALMANLAPKTKVLRDGRWGEQEAAILVPGDIISIKLGDIVPADARLLEGDALKVDQSALTGESLPVTKGPGDEVFSGSTCKQGEIEAVVIATGVHTFFGKAAHLVDSTNQVGHFQQVLTAIGNFCICSIGVGILVEIIVMFPIQHRKYRSGIENLLVLLIGGIPIAMPTVLSVTMAIGSHKLSQQGAITKRMTAIEEMAGMDVLCSDKTGTLTLNKLSVDKNLVEVFCKGVDKDHVLLLAARASRTENQDAIDAAMVGMLADPKEARAGIREIHFLPFNPVDKRTALTYIDADGNWHRVSKGAPEQILDLCHCKEDLRRKVHSIIDKYAERGLRSLAVARQEVPEKNKESPGGPWQFVGLLPLFDPPRHDSAETIRKALVLGVNVKMITGDQLAIGKETGRRLGMGTNMYPSSALLGQNKDATLEALPVDELIEKADGFAGVFPEHKYEIVKRLQEKKHIVGMTGDGVNDAPALKKADIGIAVADATDAARSASDIVLTEPGLSVIISAVLTSRCIFQRMKNYTIYAVSITIRIVLGFMLIALIWQYDFSPFMVLIIAILNDGTIMTISKDRVKPSPLPDSWKLKEIFATGIVLGSYLALMTVIFFWAMHKTDFFSDKFGVRSIRDSEHEMMSALYLQVSIVSQALIFVTRSRSWSFVERPGLLLVTAFLLAQLVATFLAVYANWGFARIKGIGWGWAGVVWLYSIVFYFPLDLLKFFIRFVLSGRAWDNLLENKTAFTTKKDYGREEREAQWATAQRTLHGLQPPEASSNTLFNDKSSYRELSEIAEQAKRRAEIARLRELNTLKGHVESVVKLKGLDIDTIQQNYTV

SEQ ID NO: 701 - protein, 649 aa, Zea mays
MARFEVNGKSVQGVDLLRRRHWPSRLDFWPFLALYALWLLLAVPALDFTDALIILAALSAAHILTFLFTAWFVDFRAFVGYSKVKDIHAANTCKVTPAKFSGSKEIVPLHKQKNVASTSAAGETEEIYFDFRKQRFIYSAEKDNFLKLRYPTKELIGHYGKGTGYGTEAKISTAVDKWGRNVFEYPQPTFQKLMKEQIMEPFFVFQVFCVALWCLDAYWYYSLFTLFMLFLFESTMAKNRLKTLTELRRVKVDSQIVLTYRCGKWVKVPGTELLPGDIVSIGRSTSGEDRSVPADMLLLAGSAIVNEAILTGESTPQWKVSIAGRGPDDMLSIRRDKNHILFGGTKVLQHTADKSVNLRSPDGGCLAFVLRTGFETSQGKLMRTILFSTERVTANNKESGLFILFLLFFAIIASGYVLVKGLEDPTRSRYKLLLSCSLIITSVIPPELPMELSIAVNTSLIALARHGIFCTEPFRIPFAGKVDICCFDKTGTLTSDDMEFQGIVTSEGDDLISDANKLPLRTQEVLSSCHALVFVDNKLVGDPLEKAAIKGIDWIYTSDEKAMSKKPGGQPVQIVHRYHFASHLKRMSVIVRIQQKFYAFIKGAPETIQEKLVDLPAAYVETYKKYTRQGSRVLALAYKLLPEMPVSFC

SEQ ID NO: 702 - protein, 1355 aa, Saccharomyces cerevisiae
MNDDRETPPKRKPGEDDTLFDIDFLDDTTSHSGSRSKVTNSHANGYYIPPSHVLPEETIDLDADDDNIENDVHENLFMSNNHDDQTSWNANRFDSDAYQPQSLRAVKPPGLFARFGNGLKNAFTFKRKKGPESFEMNHYNAVTNNELDDNYLDSRNKFNIKILFNRYILRKNVGDAEGNGEPRVIHINDSLANSSFGYSDNHISTTKYNFATFLPKFLFQEFSKYANLFFLCTSAIQQVPHVSPTNRYTTIGTLLVVLIVSAMKECIEDIKRANSDKELNNSTAEIFSEAHDDFVEKRWIDIRVGDIIRVKSEEPIPADTIILSSSEPEGLCYIETANLDGETNLKIKQSRVETAKFIDVKTLKNMNGKVVSEQPNSSLYTYEGTMTLNDRQIPLSPDQMILRGATLRNTAWIFGLVIFTGHETKLLRNATATPIKRTAVEKIINRQIIRLFTVLIVLILISSIGNVIMSTADAKHLSYLYLEGTNKAGLFFKDFLTFWILFSNLVPISLFVTVELIKYYQAFMIGSDLDLYYEKTDTPTVVRTSSLVEELGQIEYIFSDKTGTLTRNIMEFKSCSIAGHCYIDKIPEDKTATVEDGIEVGYRKFDDLKKKLNDPSDEDSPIINDFLTLLATCHTVIPEFQSDGSIKYQAASPDEGALVQGGADLGYKFIIRKGNSVTVLLEETGEEKEYQLLNICEFNSTRKRMSAIFRFPDGSIKLFCKGADTVILERLDDEANQYVEATMRHLEDYASEGLRTLCLAMRDISEGEYEEWNSIYNEAATTLDNRAEKLDEAANLIEKNLILIGATAIEDKLQDGVPETIHTLQEAGIKIWVLTGDRQETAINIGMSCRLLSEDMNLLIINEETRDDTERNLLEKINALNEHQLSTHDMKSLALVIDGKSLGFALEPELEDYLLTVAKLCKAVICCRVSPLQKALVVKMVKRKSSSLLLAIASGANDVSMIQAAHVGVGISGMEGMQAARSADIALGQFKFLKKLLLVHGSWSYQRISVAILYSFYKNTALYMTQFWYVFANAFSGQSIMESWTMSFYNLFFTVWPPFVIGVFDQFVSSRLLERYPQLYKLGQKGQFFSVYIFWGWIINGFFHSAIVFIGTILIYRYGFALNMHGELADHWSWGVTVYTTSVIIVLGKAALVTNQWTKFTLIAIPGSLLFWLIFFPIYASIFPHANISREYYGVVKHTYGSGVFWLTLIVLPIFALVRDFLWKYYKRMYEPETYHVIQEMQKYNISDSRPHVQQFQNAIRKVRQVQRMKKQRGFAFSQAEEGGQEKIVRMYDTTQKRGKYGELQDASANPFNDNNGLGSNDFESAEPFIENPFADGNQNSNRFSSSRDDISFDI

SEQ ID NO: 703 - protein, 1258 aa, Schizosaccharomyces pombe
MARDVDNKQNAKRISRDEDEDEFAGESMVGRTLDNPFLGEDEFEDIFGSESQYISSSGQNSTNPFLADTRIENSPLGSESKANQLNKQGTNVNHIEIPLRDFNDPTQPESFLPPPKNTFTSRIKKIKNLFKKEKKQVKPEDLGPRQIILNDYSANHFLHNAVSTCKYSAFTFLPKFLKEQFSKYANLFFLFTAVVQQIPGITPVNRYTTIGPMLIVLSVSGIKEIMEDIKRKKQDQELNESPCYVLQGTGFVEKQWKDVVVGDIVKIVSETFFPADLVLLSSSEPEGLCYIETANLDGETNLKIKQALPETAGLLKPVELGQLSGEVKSEQPNNNLYTFDATLKLLPSDRELPLSPDQLLLRGAQLRNTPWVYGIVVFTGHESKLMKNTTETPIKRTSVEKQVNSQILFLLCIFVFLCFASSLGALIHRSVYGSALSYVKYTSNRAGMFFKGLLTFWILYSNLVPISLFVTFELVRYIQAQLISSDLDMYNEETDTPAACRTSSLVEELGQVGYIFSDKTGTLTRNQMEFRQCTIAGVAYADVIPEDRQFTSEDLDSDMYIYDFDTLKENLKHSENASLIHQFLLVLSICHTVIPEYDESTNSIKYQASSPDEGALVKGAASIGYKFLARKPHLVTVSIFGKDESYELLHICEFNSTRKRMSIVFRCPDGKIRLYVKGADTVIMERLASDNPYLQTTIHHLEDYATVGLRTLCIAMREVPEDEYQRWSTVFETAASSLVDRAQKLMDAAEEIEKDLILLGATAIEDRLQDGVPDTISTLQTAGIKIWVLTGDRQETAINIGMSCKLIDEDMGLVIVNEETKEATAESVMAKLSSIYRNEATTGNVESMALVIDGVSLTYALDFSLERRFFELASLCRAVICCRVSPLQKALIVKMVKRNTGEVLLAIGDGANDVPMIQAAHVGVGISGMEGLQAVRSSDFSISQFCYLKKLLLVHGSWCYQRLSKLILYSFYKNIALYMTQFWYAFCNAFSGQVIFESWSISLYNVLFTVLPPVVIGIFDQFVSAGQLFQYPQLYQLGQRSEFFNLKRFWSWITNGFYHSLLLFLCSIAVFYYDGPNKDGLASGHWVWGTTLYAAILATVLGKAALISNHWTQYTVIATLGSFLLWIVFMPIYAVAAPAIGFSKEYYGIIPHLYGNLKFWASLLVLPTIALMRDFVWKYSSRMYYPEEYHYVQEIQKYNVTDYRPRIVGFHKAIRKIRQMQRMRKQRGYAFSQGEEDQSRILDAYDTTHTRGAYGEMR

SEQ ID NO: 704 - protein, 1175 aa, Oryza sativa
MASGRPLLDASPRPTQQPPASSLLPPPQPEPPLRADRLAFSLEVPDPFRREPDPSSAASQRGEEEGGGEEESRAVVVGEPSSSEAAAGFAGNGVRTAKYSVLTFLPRNLFEQFRRLSYVYFLAITVLNQLPQVAVFGRGASVLPLAFVLFVTAVKDAYEDLRRHRSDRQENNRLARVLLAPPAAGEFAPKKWKHIRVGDVVRVASSETLPADMVLLATSDPSGVAHVQTVNLDGETNLKTRYAKQETQLRFSQDGGIGGVLHCERPNRNIYGFQANLEIDGKRVSLGPSNIVLRGCELKNTTWAIGVVVYAGKETKVMLNSSGAPSKRSRLETQLNRETVILSIMLIGMCTTASVLAGIWILNHRGDLEFTQFFREKDYTTGKNYNYYGMGMQIFITFLMAVIVYQVIIPISLYISMELVRLGQAYFMGADRDLYDESSRSKFQCRALNINEDLGQIKYVFSDKTGTLTENKMEFQCASIRGVDYCSGKDSCGYSVVVDDLLWTPKMAVKIDHRLLKLLRGGGTDEETKLVLEFFLALAACNTIVPLVLDTRDSKQKLIDYQGESPDEQALVYAAASYGIVLVERTSGYVVIDVLGDRQRFDILGLHEFDSDRKRMSVIVGCPDKTVKLYVKGADSSLFGITKNSLDLDIVRATEAHLHKYSSFGLRTLVIGMRELSQPEFEEWQLAYENASTSVLGRGNLLRSVAANIENNIRILGATGIEDKLQDGVPETIESLRQADIKVWILTGDKQETAISIGYSCKLLTNDMTQIVINNNSKESCKRSLEEAHATIKKLRIASTGTQSPELASESAGVTLALIVDGNSLVYILETELQEELFKVARECSVVLCCRVAPLQKAGIVALIKNRTDDMTLAIGDGANDVSMIQMADVGVGISGQEGRQAVMASDFAMGQFRFLVPLLLVHGHWNYQRMSYMILYNFYKNATFVLVLFWYVLYTAFTLTTAITEWSSLLYTVLYTSLPTIVVGILDKDLSKETLLAYPKLYGSGQRDEKYNVNLFVLNMLEALWQSLVVFYMPYFAYRQSTIDMSSLGDLWALAPVIVVNMLLAMDIFRWNWIVHAFVWGTIAATTICLFVIDSIWFLPGYGAIFHIMGTGLFWLLLLIIVVAAMVPHFVIKAFTEYFTPSDIQVAREIEKFENVNQVNRSEVPMTRLHDPRR

SEQ ID NO: 705 - protein, 310 aa, Saccharomyces cerevisiae
MTTSILDTYPQICSPNALPGTPGNLTKEQEEALLQFRSILLEKNYKERLDDSTLLRFLRARKFDINASVEMFVETERWREEYGANTIIEDYENNKEAEDKERIKLAKMYPQYYHHVDKDGRPLYFEELGGINLKKMYKITTEKQMLRNLVKEYELFATYRVPACSRRAGYLIETSCTVLDLKGISLSNAYHVLSYIKDVADISQNYYPERMGKFYIIHSPFGFSTMFKMVKPFLDPVTVSKIFILGSSYKKELLKQIPIENLPVKYGGTSVLHNPNDKFYYSDIGPWRDPRYIGPEGEIPNIFGKFTVTS

SEQ ID NO: 706 - protein, 327 aa, Zea mays
MAAEASAVQQLAGLLDQVDAPLKKTFENVHQGYPTETLLRFLKAREWHVNKAHRMLEDSLNWRMQNEIDSILEKPIIPVDLYRSIRDTQLIGLSGYSKEGIPVFAVGVGLSTYDKASVNYYVQSHIQINEYRDRFILPTVTKKYGRPITTCIKVLDMTGLKLSALHQMKIVTAISTVDDLNYPEKTETYYIVNAPYIFSACWKVVKPLLQERTRKKVHVLRGCGRDELLQIMDYSSLPHFCRQEGSGSSKHSSGDADNCFSLDHPFHQELYSFIQEQALNQELIKQGSLHVKIPEQDPEDAKIVEVIEAEFHKLGVQNGSANGIDQA

SEQ ID NO: 707 - protein, 251 aa, Zea mays
MASAAGGGAAGEGEWLKVSQLRPMVEAQDPNAKAVDNLTLRRFLRARDHDVDKASAMFLKFLKWRREAAPGGSVPEEQVRRELSQDKLCMGGVDRAGRPILVAFAARHFSAGRDMAEFKSFVVYFFDKICARIPRGQEKFLCIVDLKGWGYSNCDVRAYIAAIEILQNYYPERLGKALMIHVPYIFMKAWKMIYPFIDTNTRDKFVFVEDKSLQETLRREIDEGQLPEFLGGKMDVIPLKDYGVQQQPQAV

SEQ ID NO: 708 - protein, 296 aa, Zea mays
MFRRKHGSDFNSDDAEQREAKISELKAALGTLSARGEKYCSEACLRRYLEARNWNVAKSRKMLEESLKWRAAYKPEDIRWPDVSVEAETGKMYRASFRDREGRTVVVMKPTKQNTSSHEGQIRFLVYTLENAIFSLPEGQEKMVWLIDFTGWTVSHASPIKTCRETANILQNHFPERLAIGFLFNPPKVFEAFYKVIKIFLDPKSVEKVNFVYEKDEESMKVMYKYIDPEVLPVEFGGKSNVVYNHEEYSELMRQDDIKTASFWAVDAKTNHANPAINGTLVPEVAPQSSLAAKAS

SEQ ID NO: 709 - protein, 256 aa, Glycine max
MEAVRAGREGAIGLGQGDGVAKDSTETELTKIRLLRAIVETRDPSSKEEDDFMIRRFLRARDLDVEKASAMLLKYLKWRNSFVPNGSVSVSDVPNELAQDKVFMQGHDKIGRPILMVFGGRHFQNKDGLDEFKRFVVYVLDKVCASMPPGQEKFVGIAELKGWGYSNSDVRGYLSALSILQDYYPERLGKLFIVNAPYIFMKVWQIVYPFIDNKTKKKIVFVEKNKVKSTLLEEMEESQVPEIFGGSLPLVPIQDS

SEQ ID NO: 710 - protein, 677 aa, Zea mays
MALPSMSLVAKGVLPFSARTSSGVTQRPVSVTASLEHKTSDARRKFLKLALGNLGVGLPTLLGAKKALADEQGVSSSRMSYSRFLEYLDKDRVKKVDLFENGTIAIVEAISPELGNRVQRVRVQLPGLSQELLQKLREKNIDFAAHSNQEDSGSLLFNLIGNLAFPLILIGGLFLLSRRAQGGLGGPNGPGFPLGFGQSRAKFQMEPNTGVTFDDVAGVDEAKQDFMEVVEFLKKPERFTAVGARIPKGVLLVGPPGTGKTLLAKAIAGEAGVPFFSISGSEFVEMFVGVGASRVRDLFKKAKENAPCIVFVDEIDAVGRQRGTGIGGGNDEREQTLNQLLTEMDGFEGNTGIIVIAATNRADILDSALLRPGRFDRQVSVDVPDVRGRTEILKVHGSNKKFDSDVSLDVIAMRTPGFSGADLANLLNEAAILAGRRGRTAISSKEIDDSIDRIVAGMEGTVMTDGKSKSLVAYHEVGHAICGTLTPGHDPVQKVTLVPRGQARGLTWFIPMDDPTLISRQQLFARIVGGLGGRAAEEVIFGEPEVTTGAAGDLQQITGLAKQMVVTFGMSEIGPWSLMEGGAQSGDVIMRMMARNSMSEKLAEDIDSAVKQLSDEAYEIALRHIRNNREAIDKIVEVLIEKETVTGDEFRAILSEFAEIPVENRVPPATPAAALPA

SEQ ID NO: 711 - protein, 810 aa, Zea mays
MASQGEPSASASDPKEKKDYSTAILERKKSPNRLVVDEATNDDNSVVALHPDTMERLQLFRGDTVLLKGKKRKDTVCIVLADETCEEPKVRMNKVVRQNLRVRLGDVVSVHQCQDVKYGKRVHILPIDDTVEGITGNLFDAFLKPYFLEAYRPVRKGDLFLVRGGMRSVEFKVIETDPSEYCIVAPDTEIFCDGEPIKREDEERLDEVGYDDVGGVRKQMAQIRELVELPLRHPQLFKSIGVKPPKGILLYGPPGSGKTLIARAVANETGAFFFLINGPEIMSKLAGESESNLRKAFEEAEKNAPSIIFIDEIDSIAPKREKTNGEVERRIVSQLLTLMDGLKSRSHVIVMGATNRPNSIDPALRRFGRFDREIDIGVPDEVGRLEVLRIHTKNMKLAEDVNLELISKDTHGYVGADLAALCTEAALQCIREKMDIIDLEDETIDAEILNSMAVTNDHFKTALGTSNPSALRETVVEVPNVSWEDIGGLENVKRELQETVQYPVEHPEKFEKFGMSPSKGVLFYGPPGCGKTLLAKAIANECQANFISVKGPELLTMWFGESEANVREIFDKARQSAPCVLFFDELDSIATQRGSSVGDAGGAADRVLNQLLTEMDGMNAKKTVFIIGATNRPDIIDPALLRPGRLDQLIYIPLPDEQSRLQIFKACLRKSPVAKDVDLNALAKYTQGFSGADITEICQRACKYAIRENIEKDIERERRMKDNPEAMEEDEVDEIAEIKAAHFEESMKYARRSVSDADIRKYQAFAQTLQQSRGFGSEFRFSEQSATAGAAAADPFASAGAAADDDDLYS

SEQ ID NO: 712 - protein, 357 aa, Glycine max
MKERQRWRAEEDALLRSYVKQYGPREWNLVSQRMNTYLNRDAKSCLERWKNYLKPGIKKGSLTEEEQRLVIHLQAKYGNKWKKIAAEVPGRTAKRLGKWWEVFKEKQQREKKEINRIADPINNSKYEHILESFAEKLVKERPSPSFVMAASDGAFLLTDTPAPASSLRPSWLSNSSSAAAIGPSSLSVKLSLSSSTVATPPFSWLPPERGPDNAPFVLGNVSALHGAIPTLSDSMHMSQMVEHCKELGEGHRALATHKKEAAWRLSRVELQLESEKANRRREKIEEFEAKIKALQEEEKAALGRIEAEYREQLAALRRDAENKEQKLAEQWDAKHLRFTRLLEQLGCRAGLLEPNAR

SEQ ID NO: 713 - protein, 361 aa, Glycine max
MKDRQRWRAEEDALLRAYVKQYGPREWNLVSQRMNTPLNRDAKSCLERWKNYLKPGIKKGSLTEEEQRLVINLQATHGNKWKKIAAQVPGRTAKRLGKWWEVFKEKQQRETKGNNCTIDPINDSKYEHILESFAEKLVKERPSTSTSTSFVMATSNSSFLHADAPAPAPALLPSWLSNSNGTAPVRPPSPSVTLSLSPSTVAAPPPWMQPPVRGQDNASPLVLGNVAPHGAVLAFGENMVMSELVECCKELDEVHHALAGHKKEAAWRLSRVELQLESEKAGRRREKMEEIEAKIKALREEQTAALDRIEAEYREQLAGLRRDAESKEQKLAEQWAAKHLRLTKFLEQVGCRSRLTEPNGR

SEQ ID NO: 714 - protein, 351 aa, Zea mays
MDQSFGNLGAGAGSSSGGSNSKAAAAAVSSSSFLQLPLSTASPAYYGAPLALLHHAAAAPSSSQQHQQQQHHHHYARHGAEMSAAEAEAIKAKIVAHPQYSALLAAYLDCQKVGAPPDVLERLTAMAAKLDARPPGRHEPRDPELDQFMEAYCNMLVKYREELTRPIDEAMEFLKRVEAQLDCISGGGGSSSARLSLADGKSEGVGSSEDDMDPNGRENDPPEIDPRAEDKELKYQLLKKYSGYLSSLRQEFSKKKKKGKLPKEARQKLLHWWELHYKWPYPSETEKIALAESTGLDQKQINNWFINQRKRHWKPSEDMPFVMMEGFHPQNAAALYMDGPFMADGMYRLGS

SEQ ID NO: 715 - protein, 308 aa, Glycine max
MDGMYGVPAEYADKALMTPENLIFPPDYHHDFLAAGRIPLFGSDEFFSSSAGIHRQQEDDVAATTVMKAKIASHPHYPRLLQAYIECQKVGAPPEIARLLEEIRRENDPCKSDAVSSSTCFGADPELDEFMEAYCDMLVKYKSDLARPFDEATTFLNKIEMQLSHLCTGASVSNVSDDGGVSSDEDLSTGDGDAQDGQLKGEDRELKDRLLRKFGSHIGTLKLEFSKKKKKGKLPKEARQALLQWWNVHYKWPYPTEADKIELAKSTGLDQKQINNWFINQRKRHWKPSENMQFSMMENFNGRILADE

SEQ ID NO: 716 - protein, 311 aa, Glycine max
MEAVYRLKPLLDVVRVGNATTSEMRLDSTANCYLQLEAPQPQENNNVTDSSSDMSDRIIKIQIANHPLYPDLLSAYIECQKVGAPPELACLLEEIGRESHRMNARREIGEGPELDHFMETFCQVLHRYKEELSRPFNEATLFLGDMESQLSNLCNETLTKSSDNNNRSDEVASGASEEELSCGEMEAFEDNVSSVTCPSDQRLKEMLLRKYSGHFSGLRKEFLKRRKKGKLPKDARMALMGWWNTHHRWPYPTEEEKVKLSEITGLDQKQINNWFINQRKRHWKPTEDMRFAVMDGLRGGGGGGIGGPMLF

SEQ ID NO: 717 - protein, 287 aa, Glycine max
MAIQDQNGFFRSQGGPPEGGGVSLSSGHSVTHIQLNDQFSCGNDYALKVRKPYTITKQRERWTDEEHKKFLEALKLYGRAWRRIEEHVGTKTAVQIRSHAQKFFSKVLHDPTGNNTNTVESIEIPPPRPKRKPMHPYPRKLVETPNKEISIPEQPMKSNSLKSSDFDQENQSPKSVLSGVGSDSLGSSDSDTPNGSLSPMSSISGFHTSSFTRAKPKTTTSEEEAGMDTDSTHDEKPLMKFKLPPNGCVSIKEDNTAEESSGRTFKLFGMTLFVTDTCKPSPTIEEC

SEQ ID NO: 718 - protein, 745 aa, Zea mays
MSGAVLVAIVASIGNLLQGWDNATIAAAVLYIKKEFQLQNEPTVEGLIVSMSLIGATIVTTFSGPLSDSIGRRPMLILSSILYFFSGLIMLWSPNVYVLLLARFVDGFGIGLAVTLVPLYISEIAPSEIRGLLNTLPQFSGSGGMFLSYCMVFGMSLSPSPDWRIMLGVLAIPSLFFFGLTIFYLPESPRWLVSKGRMAEAKKVLQKLRGKDDVSGELSLLLEGLEVGGDTSIEEYIIGPATEAADDLVTDGDKEQITLYGPEEGQSWIARPSKGPSMLGSVLSLASRHGSMVNQSVPLMDPIVTLFGSVHENMPQAGGSMRSTLFPNFGSMFSVTDQHAKNEQWDEENLHRDDEEYASDGAGGDYEDNLHSPLLSRQATGAEGKDIVHHGHRGSALSMRRQSLLGEGGDGVSSTDIGGGWQLAWKWSEKEGENGRKEGGFKRVYLHQEGVPGSRRGSIVSLPGGGDVLEGSEFVHAAALVSQSALFSKGLAEPRMSDAAMVHPSEVAAKGSRWKDLFEPGVRRALLVGVGIQILQQFAGINGVLYYTPQILEQAGVAVILSKFGLSSASASILISSLTTLLMLPCIGFAMLLMDLSGRRFLLLGTIPILIASLVILVVSNLIDLGTLAHALLSTVSVIVYFCCFVMGFGPIPNILCAEIFPTRVRGLCIAICAFTFWIGDIIVTYSLPVMLNAIGLAGVFSIYAVVCLISFVFVFLKVPETKGMPLEVITEFFAVGAKQAAAKA

SEQ ID NO: 719 - protein, 523 aa, Zea mays
MAGGGIVNTGGGKDYPGKLTLFVLLTCIVAATGGLIFGYDIGISGGVTSMNPFLEKFFPEVYRKKQEAKTNQYCKYDNQLLQTFTSSLYLAALVASFFAATVTRAVGRKWSMLVGGLTFLVGAALNGAAQNIAMLIIGRILLGVGVGFANQSVPVYLSEMAPARLRGMLNIGFQLMITIGILAAELINYGTNKIKAGYGWRVSLALAAVPAAIITLGSLFLPDTPNSLLERGHPEEARRMLRRIRGTDDIGEEYADLVAASEEARQVRHPWRNILRRRYRAQLTMAVAIPFFQQLTGINVIMFYAPVLFDTLGFKNDASLMSSVITGLVNVFATVVSIVTVDRVGRRKLFLQGGAQMIVCQLIVGTLIAAKFGTSGTGDIAKGYAAVVVVFICAYVAGFAWSWGPLGWLVPSEIFPLEIRPAGQSINVSVNMFFTFCIAQAFLTMLCHFKFGLFYFFAGWVVIMTVFIAFFLPETKNVPIEEMVLVWKSHWFWKRFIADEDVHVGIGNNHPAKNGSDTKGADA

SEQ ID NO: 720 - protein, 518 aa, Glycine max
MPAVGGINTGGGKEYPGSLTLFVTVTCIVAAMGGLIFGYDIGISGGVTSMDPFLLKFFPSVFRKKNSDKTVNQYCQYDSQTLTMFTSSLYLAALLSSLVAATVTRKFGRKLSMLFGGLLFLVGALINGFAQHVWMLIVGRILLGFGIGFANQSVPLYLSEMAPYKYRGALNIGFQLSITVGILVANVLNYFFAKIKGGWGWRLSLGGAMVPALIITVGSLVLPDTPNSMIERGDREKAKAQLQRIRGIDNVDEEFNDLVAASESSSQVEHPWRNLLQRKYRPHLTMAVLIPFFQQLTGINVIMFYAPVLFSSIGFKDDAALMSAVITGVVNVVATCVSIYGVDKWGRRALFLEGGVQMLICQAVVAAAIGAKFGTDGNPGDLPKWYAIVVVLFICIYVSAFAWSWGPLGWLVPSEIFPLEIRSAAQSINVSVNMLFTFLIAQVFLTMLCHMKFGLFLFFAFFVLIMTFFVYFFLPETKGIPIEEMGQVWQAHPFWSRFVEHDDYGNGVEMGKGAIKEV

SEQ ID NO: 721 - protein, 510 aa, Zea mays
MPGGAFLLNGSGGGMADYGGGLTVPVVVTCLMAASGGLIFGYDIGISGGVSEMEDFLNKFFPGLLKRTARANKDVYCIYNNQALTAFTSSLYAFGMVGTLLASRVTRRLGRQAVMLIGGGLFLAGALVNAAAANIAMLIVGRMLLGLGLGFSGQATPVYLAEVSPPRWRGGFISAFPLFISVGYLVANLINYGTSRIPGWGWRLSLGLASVPAAVMVVGAAFIPDTPSSLVLRGKHDDARAALQRVRGKGVDIGPEFADILAAAENDRRNEEGAFRRILRREYRPYLVMAVAFPVFLNLTGVAVTAFFSPILFRTVGFESDAALMGAVILGLMNIGGILASGFAMDRYGRKLLFMIGGALMFTCQVAMASIIGSHLGNGSKMPKGYAVTVLVVALIFSASFSWSWGALYWTIPGEIYPVEVRSAGQGAAVALNLGLNFLQAQFFLAMLCCFKYGTFLFYASWLVVMTAFAVAFVPETKGVPLESMAHVFARHWYWGRFVKDHQKLGEEST

SEQ ID NO: 722 - protein, 580 aa, Glycine max
MEGGGVEVDASAFRECLSLSWKNPYVLRLAFSAGIGGLLFGYDTGVISGAILYIRDDFKAVDRKTWLQEAIVSMALAGAIVGAAVGGWINDRFGRRKAILLADTLFFIGSAVMAAATNPSILIVGRVFVGLGVGMASMASPLYISEASPTRVRGALVSLNGFLITGGQFLSYLINLAFTKAPGTWRWMLGAAVVPALIQIVLMMMLPESPRWLFRKGREEEGKEILRKIYPPQEVEAEINTLRESVEIEIKEAEATDNISIVKMLKTKTVRRGLYAGMGLQIFQQFVGINTVMYYSPTIVQLAGFASNRTALLLSLVTSGLNAFGSILSIYFIDRTGRKKLVLFSLCGVVFSLVVLTVVFHQSTTHSPMVSALETSHFNNTCPDYHSAANPGGWDCMKCLKASPNCGFCASGANKLLPGACLISNDTTKDQCHEEDRLWYTVGCPSKFGWLAIVGLALYIIFFSPGMGTVPWVVNSEIYPLRYRGICGGMASTSNWVSNLIVAQSFLSLTQAIGTSWTFMIFIFITIAAIIFVIIFVPETKGLPMEEVEKMLEGRDLNFKFWQRSSHCGEEVPPQKTQSN

SEQ ID NO: 723 - protein, 539 aa, Zea mays
MMRCAATGGGCVASWSGDRRLPAVNPCSVRMPTGNDGWCAGLRSRAADLAGLEMANLRGGVGGLFRASPRYGRLQATAAVDPEDIPLEKVQVKSSGHVLPYVGVACLGAILFGYHLGVVNGALEYLAKDLGIAENAVLQGWVVSTSLAGATLGSFTGGSLADKFGRTRTFILDAVPLALGAFLSATAQDIRTMIIGRLLAGIGIGVSSALVPLYISEISPTEIRGTLGTVNQLFICIGILAALLAGLPLAGNPAWWRTMFGIAVVPSILLAVGMAFSPESPRWLFQQGKVTQAELAVKRLYGKEMVTEIMFDLRASGQSSSESEAGWFDLFSKRYWKVVSVGAALFLFQQLAGINAVVYYSTSVFRSAGIASDVAASALVGAANVFGTMVASSLMDKQGRKSLLITSFSGMGASMLLLALSFTWKALAPYSGTLAVVGTVLYVLSFALGAGPVPALLLPEIFASRIRAKAVALSLGMHWVSNFFIGLYFLSVVSKFGISNVYLGFASVCALAVLYIAGNVVETKGRSLEEIERELSVAE

SEQ ID NO: 724 - protein, 533 aa, Zea mays
MAGAGAAANGGRNKYAVLDRSEERQTDARTERRRRPLAPESERGRRERFVYACAVFASLNAVLLGYDVGVMSGAIIYMQKDLHITEFQQEILVGCLSVVSLLGSLSGGRTSDAIGRKWTMGLGAIVFQIGATIMTFAPSFTVLMIGRLLAGVGIGFGAMVSGVYIAEISPAGARGTLTSLPEICINFGILLGYVSNYAFSGLSEHINWRIMLGVGILPSVFIGFALFVIPESPRWLMMEKRVSEARAVLLQISESEAEAEERLAEIEEAAGLMKSMKSEDKEVWRELLNPSPAVRRMLYAGCGIQLFQQITGIDATVYYSPTIFKDAGIKSDQELLAATVAVGFTKTVFILVAIFLIDRVGRKPLLYVSTIGMTICLFLLGVALTLQNHAVGLMSPRVGIDLAIFAVCGNVAFFSIGMGPICWVLSSEVFPLRLRAQGSALGQVGGRVSSGLVSMSFLSMARAISVAGMFFVFAAISTISVLFVYFCVPETKGKTLEQIEMMFESGDEWGGGEIELEDTQHLIPSIKKSVPLG

SEQ ID NO: 725 - protein, 481 aa, Glycine max
MAIEKHEDVESGYLHEPFIQPEDAAAACKENGSDKSVKNGSIGMVLLSTLVAVCGSFTFGTCVGYSAPTQAAIRADLNLSLAEFSMFGSLVTIGAMLGAITSGRITDFIGRKGAMRISTGFCITGWIAVFFSKGSYSLDFGRFFTGYGIGVISYVVPVYIAEIAPKNLRGGLATTNQLLIVTGGSVSFLLGSVINWRELALAGLVPCICLLVGLCFIPESPRWLAKVGREKEFQLALSRLRGKDADISDEAAEILDYIETLQSLPKTKLLDLFQSKYVHSVVIGVGLMACQQSVGINGIGFYTAEIFVAAGLSSGKAGTIAYACIQIPFTLLGAILMDKSGRRPLVMVSAAGTFLGCFVAAFAFFLKDQSLLPEWVPILAFAGVLIYIAAFSIGLGSVPWVIMSEIFPIHLKGTAGSLVVLVAWLGAWVVSYTFNFLMSWSSPGTLFLYAGCSLLTILFVAKLVPETKGKTLEEIQACISS

SEQ ID NO: 726 - protein, 511 aa, Glycine max
MEAPSLTKPNDPTKPSNTSSTLSLEGGPGEASPLRKMFAVASIAAGIQFGWALQLSLLTPYVQLLGVPHAAASFIWLCGPISGLVVQPIVGYYSDHCTSRFGRRRPFILGGALAVAIAVFLIGYAADIGHSAGDDITKKTRPRAVGVFVIGFWILDVANNMLQGPCRAFLADLAAGDQQKTRIANGFFSFFMAVGNVLGYAAGSYSGLHKIFPFTETKACDVFCANLKSCFFFSILLLLFLATVALLYVKDKQVEAIPLDDATQPSCFFQLFGALKELKRPMWMLMLVTAVNWVGWFPYFLFDTDWMGREVYGGTAGEDAYAKGVRVGSLGLMVNAVVLGFMSLAVEPLGKMVGGVKRLWAIVNFILAIGFGMTVVITKVAEHQRRMNPAAVGHPSEGVVVGSMVFFGVLGVPLAITFSVPFALASIYCSASGAGQGLSLGVLNLAIVVPQMVVSALSGPWDSLFGGGNLPAFMVGAAAAALSAIMAIVLLPTPKPADEAKASSMMAGGFH

SEQ ID NO: 727 - protein, 508 aa, Zea mays
MAGDGMEVSASGGGGGNKQPQISLLGLFLACMVAGGVQYGWALQLSLLTPYVQTLGIPHALTSVMWLCGPIAGLLVQPCVGLYSDKCTSKLGRRRPFIFTGCIIICISVIVIGFSSDIGYALGDTTEDCNVYTGKRLHAALFFVMGFWLLDFSNNTVQGPARALMADLAGSHGPSTANAIFVSWMAIGNILGYSSGSTDKWHTWFPFLQTRACCEACANLKAAFLVSVVFLGLSTVVTMIFAREVPLDPAAAAKQDEAGESSGPFAVFKGMKNMPPGMPQVLIVTGLTWLSWFPFILFDTDWMGREMYHGRPDGSPEEVARFQEGVRQGAFGLLLNSVVLGASSFLIEPMCRKLTAKVVWVMSSFLVCVAMALVTVLSSWSLGDIGGNVQDAAAVDKGLKTTALAIFVFLGFPFAVLCSVPFAVTAQLAAAKGGGQGLCTGVLNISIVVPQMVIAIGSGPWDELFGKGNIPAFGLAAVFAFTAAVAGIIMLPKQPKTSFRSVSMGGGH

SEQ ID NO: 728 - protein, 521 aa, Zea mays
MPGAVIVHHHTRYKTYPGEVTGIAIFSCFIASVAGCIFGYDIGLTSGLTSTEPFLVKFFPSIYEEMKRQVVVNQYCKFDSQVLTLFSSSLFLAATVATFFAGPMTRAFGRKWTLFAAASAYVVGACIGGVSVNFPMLLTGRVLVGSGVGISIQAAPLYISEVAPAQQRGMLNILFQLMITVGILTANMTNYLASKVSGGWGWRIPVTFGAIPAAVIALGALAIPDTPASLVERGDTATARKTLSQIRGVGDVREEFDDLAAASEDAKAVQCPWRELFFGGKYKPQLTFALLIPFFQQLTGINVIMFYAPVLFKTVGFKQNATLVSSVITGLVNVFSTFVAIATADKIGRRALFLQGGTQMIISQILVGTFIGLQFGMSGTGDISEQYAMCIVLFVCVYVAGFAWSWGPMGWLVPSEIYPLAVRSAAMSVTVAVNMFFTAFIGQIFLTLLCHLRFGLFYFFGAWVLLMTLFIAMLLPETKSVPVEEMAHVWKKHWFWRKFVIDTGNDARNAEMRKRIALEMS

SEQ ID NO: 729 - protein, 514 aa, Zea mays
MAGGVVVNAAGGKTYPGRMTPFVFFTCLVASSGGLIFGYDIGISGGVTSMASFLKEFFPSVYAKAAANKDTNQYCKFDSQLLTLFTSSLYLAALATSFVAASVTRVFGRKWSMFCGGVTFLAGSALNGAATDVMMLIMGRILLGVGVGFANQSVPLYLSEMAPAKLRGMLNIGFQLMTTIGILAANLINFWTAGIEGGWGWRIGLGLAGVPALIITLGALVLPDTPNSLIARGFNDDAKAVLVKIRGTDDVQDEYDDMVAASEEANAIEHPWRNILERRYRPQLTVAALIPFFQQLTGINVIMFYAPVLFLTIGFGDDASLMAAVITGLVNMFATVVSIVCVDRLGRRALFLQGGTQMFVSQIVVGTLIALQFGTAGVGEMSRSNAWLLVLFICLYVAGFAWSWGPLGWLVPSEVFALEVRSAGQSIAVCVNMLLTFIIGQAFLSMLCSLKFGLFYFFAGWMFIMTTFIALFLPETKGVPIEEMNLVWSRHWFWGKYVNVDTQHGGASPRSNGV

SEQ ID NO: 730 - protein, 392 aa, Oryza sativa
METVAAASYTRGAATRSPACCAAMSFSQSYRPKAARPPSTFYGESLRVNTARSLPSGRQSKAASRAALSTRCEIGDSLEEFLTKATPDKNLIRLLICMGEAMRTISFKVRTASCGGTACVNSFGDEQLAVDMLADKLLFEALEYSHVCKYACSEEVPELQDMGGPVDGGFSVAFDPLDGSSIVDTNFTVGTIFGVWPGDKLTGVTGGDQVAAAMGIYGPRTTYIIALKDCPGTHEFLLLDEGKWQHVKDTTTIGEGKMFSPGNLRATFDNPEYDKLINYYVKEKYTLRYTGGMVPDVNQIIVKEKGIFTNVTSPTAKAKLRLLFEVAPLGFLIEKAGGYSSDGKQSVLDKVINNLDERTQVAYGSKNEIIRFEETLYGSSRLTAGATVGAAA

SEQ ID NO: 731 - protein, 339 aa, Oryza sativa
MDHEADAYRTDLMTITRYVLNEQSRNPEARGDLTILLSHIVLGCKFVASAVNKAGLAKLIGLAGETNVQGEEQKKLDVLSNEVFVKALVSSGRTCVLVSEEDEEATFVDPALRGKYCVCFDPLDGSSNIDCGVSIGTIFGIYMIKDKENVTLEDVLQPGKNMVAAGYCMYGSSCTLVLSTGNGVNGFTLDPSLGEFILTHPDIKIPKKGKIYSVNEGNAKNWDEPTAKFVEKCKFPKDGSSPKSLRYIGSMVADVHRTLLYGGVFLYPADKKSPNGKLRVLYEVFPMSFLMEQAGGQSFTGKERALDLVPTKIHERSPIFLGSFEDVEEIKGLYAAQAK

SEQ ID NO: 732 - protein, 393 aa, Triticum sp.
METVAAAGYARGAATRSPACCAAMSFSQSYRPKAARPATSFYGESLRANTARTSFPAGRQSKAASRAALTTRCAIGDSLEEFLTKATPDKNLIRLLICMGEAMRTIAFKVRTASCGGTACVNSFGDEQLAVDMLADKLLFEALEYSHVCKYACSEEVPELQDMGGPVEGGFSVAFDPLDGSSIVDTNFTVGTIFGVWPGDKLTGVTGGDQVAAAMGIYGPRTTFVVALKDCPGTHEFLLLDEGKWQHVKDTTSIGEGKMFSLGNLRATFDNPDYDKLVNYYVKEKYTLRYTGGMVPDVNQIIVKEKGIFTNVTSPTAKAKLRLLFEVAPLGFLIEKAGGHSSDGKQSVLDKVISVLDERTQVAYGSKNEIIRFEETLYGSSRLAASATVGATA

SEQ ID NO: 733 - protein, 440 aa, Ralstonia eutropha
MAQVSRICNGVQNPSLISNLSKSSQRKSPLSVSLKTQQHPRAYPISSSWGLKKSGMTLIGSELRPLKVMSSVSTACMPEVQRMTLTQFLIEERRRYPDASGGFNGLILNVAMACKEIARAVAFGALGGLHGKASNQAGEAGAVNVQGEIQQKLDVLSNTTFLRVNEWGGYLAGMASEEMEAPYQIPDHYPRGKYLLVFDPLDGSSNIDVNVSVGSIFSVLRAPEGASAVTEQDFLQPGSAQVAAGYALYGPTTMLVLTVGNGVNGFTLDPNLGEFFLTHPNLQVPADTQEFAINASNSRFWEAPVQRYIAECMAGKSGPRGKDFNMRWIASMVAEAHRILMRGGVFMYPRDSKDPAKPGRLRLLYEANPIAFLMEQAGGRASTGRQTLMSVAPGALHQRIGVIFGSRNEVERIEGYHTDQTDPDLPSPLFNERSLFRASA

SEQ ID NO: 734 - protein, 383 aa, Chlorella sorokiniana
MQATAVATAAPAARVATTGKAATGVKAAPRVAVRAAGASASSSFATGARLSAKASRTAARRAAVAAQAKIGDTLEEFLLEATPDPKLRQLMMSMSEAIRTIAYKVRTASSGGTASVNSFGDEQLAVDLLADKLLFEALKYSGCCKLACSEEVPEPLDLGGEGFSVAFDPLDGSSIVDTNFSVGTIFGVWPGDKLTGITGRQQAAAGMGIYGPRTVFCIALKDAPGCHEFLLQDDGKWLHVKETETIGEGKMFSPGNLRATFDNPAYEKLIAYYIGEKYTLRYTGGMVPDVFQIIVKEKGVFTNVISPSTKAKLRLLFEVAPLALLVEKAGGASSCDGLCVSGLDVEVKQHDQRTQICYGSKGEVRRFEEYMYGNSPRFSEVTA

SEQ ID NO: 735 - protein, 521 aa, Glycine max
MLLELALGLLVLALFLHLRPTPTAKSKALRHLPNPPSPKPRLPFIGHLHLLKDKLLHYALIDLSKKHGPLFSLYFGSMPTVVASTPELFKLFLQTHEATSFNTRFQTSAIRRLTYDSSVAMVPFGPYWKFVRKLIMNDLLNATTVNKLRPLRTQQIRKFLRVMAQGAEAQKPLDLTEELLKWTNSTISMMMLGEAEEIRDIAREVLKIFGEYSLTDFIWPLKHLKVGKYEKRIDDILNKFDPVVERVIKKRREIVRRRKNGEVVEGEVSGVFLDTLLEFAEDETMEIKITKDHIKGLVVDFFSAGTDSTAVATEWALAELINNPKVLEKAREEVYSVVGKDRLVDEVDTQNLPYIRAIVKETFRMHPPLPVVKRKCTEECEINGYVIPEGALILFNVWQVGRDPKYWDRPSEFRPERFLETGAEGEAGPLDLRGQHFQLLPFGSGRRMCPGVNLATSGMATLLASLIQCFDLQVLGPQGQILKGGDAKVSMEERAGLTVPRAHSLVCVPLARIGVASKLLS

SEQ ID NO: 736 - protein, 336 aa, Glycine max
MENSTEESHLRSENSVTYESPYPIYGMSFSPSHPHRLALGSFIEEYNNRVDILSFHPDTLSVTPHPSLSFDHPYPPTKLMFHPRKPSPSSSSDLLATSGDYLRLWEIRDNSVDAVSLFNNSKTSEFCAPLTSFDWNDIDPNRIATSSIDTTCTIWDIERTLVETQLIAHDKEVYDIAWGEARVFASVSADGSVRIFDLRDKEHSTIIYESPHPDTPLLRLAWNKQDLRYMATILMDSNKVVILDIRSPTTPVAELERHRGSVNAIAWAPHSSTHICSAGDDTQALIWELPTLASPTGIDPVCMYSAGCEINQLQWSAAQPDWIAIAFANKMQLLKV

What is claimed is:

1. An isolated polynucleotide comprising a nucleic acid sequence selected from the group consisting of SEQ ID NO: 1 through SEQ ID NO: 368 or complements thereof.

2. A recombinant DNA construct comprising a polynucleotide according to claim 1.

3. A recombinant DNA construct according to claim 2, wherein said polynucleotide is operably linked to a promoter functional in a plant cell.

4. A recombinant DNA construct according to claim 2, wherein said polynucleotide is operably linked to a 3′ untranslated region functional in a plant cell.

5. A transformed cell or organism comprising a polynucleotide according to claim 1.

6. The transformed cell or organism according to claim 5, wherein the cell is a plant cell or plant.

7. The transformed cell or organism according to claim 6, wherein the organism is a plant selected from the group consisting of cotton, wheat, soybean, maize, rice, canola, teosinte and Arabidopsis.

8. A substantially purified polypeptide comprising an amino acid sequence selected from the group consisting of SEQ ID NO: 369 through SEQ ID NO: 736.

9. An isolated polynucleotide encoding a polypeptide having an amino acid sequence selected from the group consisting of SEQ ID NO: 369 through SEQ ID NO: 736.

10. An isolated polynucleotide encoding a polypeptide having at least 70% amino acid sequence identity with a polypeptide having an amino acid sequence selected from the group consisting of SEQ ID NO: 369 through SEQ ID NO: 736.

11. A recombinant DNA construct comprising a polynucleotide selected from the group consisting of:
(a) a polynucleotide comprising a nucleic acid sequence selected from the group consisting of SEQ ID NO: 1 through SEQ ID NO: 368;
(b) a polynucleotide encoding a polypeptide having an amino acid sequence selected from the group consisting of SEQ ID NO: 369 through SEQ ID NO: 736;
(c) a polynucleotide comprising a nucleic acid sequence complementary to a nucleic acid sequence selected from the group consisting of SEQ ID NO: 1 through SEQ ID NO: 368;
(d) a polynucleotide having at least 60% sequence identity to a polynucleotide of (a), (b) or (c);
(e) a polynucleotide encoding a polypeptide having at least 70% sequence identity to a polypeptide having an amino acid sequence selected from the group consisting of SEQ ID NO: 369 through SEQ ID NO: 736;
(f) an oligonucleotide comprising from about 15 to 100 nucleotide bases, wherein the oligonucleotide hybridizes under low stringency conditions to a polynucleotide of (a), (b) or (c);
(g) a polynucleotide comprising a promoter functional in a plant cell, operably joined to a coding sequence for a polypeptide having at least 70% sequence identity to a polypeptide having an amino acid sequence selected from the group consisting of SEQ ID NO: 369 through SEQ ID NO: 736, wherein the encoded polypeptide is a functional homolog of said polypeptide having an amino acid sequence selected from the group consisting of SEQ ID NO: 369 through SEQ ID NO: 736; and
(h) a polynucleotide comprising a promoter functional in a plant cell, operably joined to a coding sequence for a polypeptide having an amino acid sequence selected from the group consisting of SEQ ID NO: 369 through SEQ ID NO: 736, wherein transcription of the coding sequence produces an RNA molecule having sufficient complementarity to a polynucleotide encoding said polypeptide to result in decreased expression of said polypeptide when the construct is expressed in a plant cell.

12. A transformed plant comprising a recombinant DNA construct, wherein said construct comprises a promoter region functional in a plant cell operably joined to a polynucleotide comprising coding sequence for a polypeptide having an amino acid sequence selected from the group consisting of SEQ ID NO: 369 through SEQ ID NO: 736.

13. A transformed plant of claim 12 wherein said polynucleotide is oriented with respect to said promoter such that transcription of said polynucleotide produces an mRNA encoding said polypeptide.

14. A transformed plant of claim 12 wherein said polynucleotide is oriented with respect to said promoter such that transcription from said polynucleotide produces an RNA complementary to the mRNA encoding said polypeptide.

15. The transformed plant according to claim 12 wherein said plant is maize.

16. The transformed plant according to claim 12 wherein said plant is soybean.

17. A method of producing a plant having an improved property, wherein said method comprises transforming a plant with a recombinant construct comprising a promoter region functional in a plant cell operably joined to a polynucleotide comprising coding sequence for a polypeptide associated with said property, and growing said transformed plant, wherein said polynucleotide is selected from the group consisting of:
(a) a polynucleotide encoding a polypeptide useful for manipulating protein quality in plant cells by modification of amino acid transporters, wherein said polynucleotide comprises a sequence selected from the group consisting of SEQ ID NO: 1 through SEQ ID NO: 9;
(b) a polynucleotide encoding a polypeptide useful for improving plants by providing protection against osmotic stress, wherein said polynucleotide comprises a sequence selected from the group consisting of SEQ ID NO: 10 through SEQ ID NO: 12;
(c) a polynucleotide encoding a polypeptide useful for improving yield in a plant by altering sugar transport and/or metabolism, wherein said polynucleotide comprises a sequence selected from the group consisting of SEQ ID NO: 10 through SEQ ID NO: 12;
(d) a polynucleotide encoding a polypeptide useful for providing increased vigor to a plant by modification of plant steroid biosynthesis, wherein said polynucleotide comprises a sequence selected from the group consisting of SEQ ID NO: 13 through SEQ ID NO: 19;
(e) a polynucleotide encoding a polypeptide useful for improving crop productivity or grain composition by manipulating plant growth rate, wherein said polynucleotide comprises a sequence selected from the group consisting of SEQ ID NO: 20 through SEQ ID NO: 24;
(f) a polynucleotide encoding a polypeptide useful for providing improved plants having cercosporin resistance, wherein said polynucleotide comprises SEQ ID NO: 25;
(g) a polynucleotide encoding a polypeptide useful for improving plant growth and grain quality by modification of nitrogen/nitrate levels in a plant, wherein said polynucleotide comprises a sequence selected from the group consisting of SEQ ID NO: 26 through SEQ ID NO: 27;
(h) a polynucleotide encoding a polypeptide useful for altering nitrogen utilization in a plant by modification of siroheme synthesis, wherein said polynucleotide comprises a sequence selected from the group consisting of SEQ ID NO: 28 through SEQ ID NO: 30;
(i) a polynucleotide encoding a polypeptide useful for improving plant cold tolerance, wherein said polynucleotide comprises sequence of a cold induced gene selected from the group consisting of SEQ ID NO: 31 through SEQ ID NO: 42;
(j) a polynucleotide encoding a polypeptide useful for improving plant yield by modification of the cell cycle pathway, wherein said polynucleotide comprises a sequence selected from the group consisting of SEQ ID NO: 43 through SEQ ID NO: 61;
(k) a polynucleotide encoding a polypeptide for improving plant growth by manipulating cytokinin levels or signaling pathways, wherein said polynucleotide comprises a sequence selected from the group consisting of SEQ ID NO: 62 through SEQ ID NO: 76;
(l) a polynucleotide encoding a polypeptide useful for alteration of oil content of a seed by manipulating embryo size, wherein said polynucleotide comprises a sequence selected from the group consisting of SEQ ID NO: 77 through SEQ ID NO: 79;
(m) a polynucleotide encoding a polypeptide useful for improving plant growth as the result of manipulating the cell cycle by modification of E2F activity, wherein said polynucleotide comprises a sequence selected from the group consisting of SEQ ID NO: 80 through SEQ ID NO: 82;
(n) a polynucleotide encoding a polypeptide useful for reduction of senescence, wherein said polynucleotide comprises a sequence selected from the group consisting of SEQ ID NO: 83 through SEQ ID NO: 93;
(o) a polynucleotide encoding a polypeptide useful for improving insect resistance, wherein said polynucleotide comprises a sequence selected from the group consisting of SEQ ID NO: 94 through SEQ ID NO: 96;
(p) a polynucleotide encoding a polypeptide useful for improving cold tolerance in a plant, wherein said polynucleotide comprises SEQ ID NO: 97;
(q) a polynucleotide encoding a polypeptide useful for improving cold or heat tolerance of a plant by alteration of fatty acid composition, wherein said polynucleotide comprises a sequence selected from the group consisting of SEQ ID NO: 98 through SEQ ID NO: 101;
(r) a polynucleotide encoding a polypeptide useful for improving stress resistance in a plant by modification of ferritin levels, wherein said polynucleotide comprises a sequence selected from the group consisting of SEQ ID NO: 102 through SEQ ID NO: 104;
(s) a polynucleotide encoding a polypeptide useful for improving plant herbicide resistance, wherein said polynucleotide comprises a sequence selected from the group consisting of SEQ ID NO: 105 through SEQ ID NO: 107;
(t) a polynucleotide encoding a transcription factor polypeptide useful for improving fungal resistance, wherein said polynucleotide comprises SEQ ID NO: 108;
(u) a polynucleotide encoding a polypeptide useful for improving plant growth and stress resistance by increasing levels of GABA, wherein said polynucleotide comprises SEQ ID NO: 109;
(v) a polynucleotide encoding a polypeptide useful for improving cold tolerance in a plant by heat generation resulting from modification of alternatative oxidase activity, wherein said polynucleotide comprises a sequence selected from the group consisting of SEQ ID NO: 110 through SEQ ID NO: 111;
(w) a polynucleotide encoding a polypeptide useful for improving heat tolerance in a plant, wherein said polynucleotide comprises a sequence selected from the group consisting of SEQ ID NO: 112 through SEQ ID NO: 119;
(x) a polynucleotide encoding a polypeptide useful for improving plant growth and disease resistance by altering the activity of heterotrimeric G proteins, wherein said polynucleotide comprises a sequence selected from the group consisting of SEQ ID NO: 120 through SEQ ID NO: 124;
(y) a polynucleotide encoding a polypeptide useful for improving homologous recombination in a plant, wherein said polynucleotide comprises a sequence selected from the group consisting of SEQ ID NO: 125 through SEQ ID NO: 126;
(z) a polynucleotide encoding a polypeptide useful for improving tolerance to heat shock by modification of hsp90 protein function, wherein said polynucleotide comprises a sequence selected from the group consisting of SEQ ID NO: 127 through SEQ ID NO: 147;
(aa) a polynucleotide encoding a polypeptide useful for generating improved plants having increased seed or kernel yield under drought conditions, wherein said polynucleotide comprises SEQ ID NO: 148;
(bb) a polynucleotide encoding a polypeptide useful for improving plant growth by modification of jasmonate activity, wherein said polynucleotide comprises a sequence selected from the group consisting of SEQ ID NO: 149 through SEQ ID NO: 162;
(cc) a polynucleotide encoding a polypeptide useful for improving plant growth by modification of nitric oxide signaling pathways, wherein said polynucleotide sequence comprises SEQ ID NO: 163;
(dd) a polynucleotide encoding a polypeptide useful for improving plant vigor by modification of photomorphogenic response, wherein said polynucleotide comprises SEQ ID NO: 164;
(ee) a polynucleotide encoding a polypeptide useful for improving plant growth by modification of phosphorous utilization, wherein said polynucleotide comprises a sequence selected from the group consisting of SEQ ID NO: 165 through SEQ ID NO: 180;
(ff) a polynucleotide encoding a polypeptide useful for reducing shade avoidance in a plant by modification of phytochrome activity, wherein said polynucleotide comprises a sequence selected from the group consisting of SEQ ID NO: 181 through SEQ ID NO: 210;
(gg) a polynucleotide encoding a polypeptide useful for improving nitrogen assimilation by modification of the TOR pathway, wherein said polynucleotide comprises a sequence selected from the group consisting of SEQ ID NO: 211 through SEQ ID NO: 225;
(hh) a polynucleotide encoding a polypeptide useful for enhancing seed germination and growth by modification of plant hemoglobin levels, wherein said polynucleotide comprises a sequence selected from the group consisting of SEQ ID NO: 226 through SEQ ID NO: 227;
(ii) a polynucleotide encoding a polypeptide useful for controlling apomixis or altering grain composition in a seed by manipulating polycomb proteins, wherein said polynucleotide comprises a sequence selected from the group consisting of SEQ ID NO: 228 through SEQ ID NO: 232;
(jj) a polynucleotide encoding a polypeptide useful for improving plant growth by modification of retinoblastoma-like proteins in a plant, wherein said polynucleotide comprises a sequence selected from the group consisting of SEQ ID NO: 233 through SEQ ID NO: 234;
(kk) a polynucleotide encoding a polypeptide useful for increasing root mass in a plant, wherein said polynucleotide comprises a sequence selected from the group consisting of SEQ ID NO: 235 through SEQ ID NO: 239;
(ll) a polynucleotide encoding a polypeptide useful for generating early flowering in a plant, wherein said polynucleotide comprises a sequence selected from the group consisting of SEQ ID NO: 240 through SEQ ID NO: 246;
(mm) a polynucleotide encoding a polypeptide useful for improving stalk strength in a plant, wherein said polynucleotide comprises a sequence selected from the group consisting of SEQ ID NO: 247 through SEQ ID NO: 248;
(nn) a polynucleotide encoding a polypeptide useful for conferring virus resistance in a plant, wherein said polynucleotide comprises a sequence selected from the group consisting of SEQ ID NO: 249 through SEQ ID NO: 257;
(oo) a polynucleotide encoding a polypeptide useful for improving yield in a plant, wherein said polynucleotide comprises a sequence selected from the group consisting of SEQ ID NO: 258 through SEQ ID NO: 272;
(pp) a polynucleotide encoding a polypeptide useful for improving water stress tolerance in a plant by modification of wax biosynthesis, wherein said polynucleotide comprises a sequence selected from the group consisting of SEQ ID NO: 273 through SEQ ID NO: 277;
(qq) a polynucleotide encoding a polypeptide useful for improving plant growth by altering development, wherein said polynucleotide comprises a sequence selected from the group consisting of SEQ ID NO: 278 and SEQ ID NO: 282;
(rr) a polynucleotide encoding a polypeptide useful for improving plant yield by reducing plant height in high density populations, wherein said polynucleotide encodes a growth regulating factor and comprises a sequence selected from the group consisting of SEQ ID NO: 279 through SEQ ID NO: 281;
(ss) a polynucleotide encoding a polypeptide useful for improving photosynthetic carbon fixation in a plant, wherein said polynucleotide comprises a sequence selected from the group consisting of SEQ ID NO: 283 through SEQ ID NO: 286;
(tt) a polynucleotide encoding a polypeptide useful for improving plant growth by modification of F-box proteins, wherein said polynucleotide comprises a sequence selected from the group consisting of SEQ ID NO: 287 through SEQ ID NO: 291;
(uu) a polynucleotide encoding a polypeptide useful for improving biotic and abiotic stress resistance in a plant, by modification of the mevalonate pathway, wherein said polynucleotide comprises a sequence selected from the group consisting of SEQ ID NO: 292 through SEQ ID NO: 293;
(vv) a polynucleotide encoding a polypeptide useful for improving resistance to oxidative stress in a plant, wherein said polynucleotide comprises a sequence selected from the group consisting of SEQ ID NO: 294 through SEQ ID NO: 331;
(ww) a polynucleotide encoding a polypeptide useful for improving plant growth by modification of ATP production in a plant, wherein said polynucleotide comprises a sequence selected from the group consisting of SEQ ID NO: 332 through SEQ ID NO: 336;
(xx) a polynucleotide encoding a polypeptide useful for improving plant growth by modification of ATP or ADP transport in a plant, wherein said polynucleotide comprises a sequence selected from the group consisting of SEQ ID NO: 337 through SEQ ID NO: 341;
(yy) a polynucleotide encoding a polypeptide useful for altering fatty acid or amino acid composition of a plant seed by modification of AAA ATPase activity in a plant, wherein said polynucleotide comprises a sequence selected from the group consisting of SEQ ID NO: 342 through SEQ ID NO: 343;
(zz) a polynucleotide encoding a polypeptide useful for improving plant yield by modification of plant architecture, wherein said polynucleotide comprises a sequence selected from the group consisting of SEQ ID NO: 344 through SEQ ID NO: 349;
(aaa) a polynucleotide encoding a polypeptide useful for improving yield in a plant by modification of carbohydrate transport, wherein said polynucleotide comprises a sequence selected from the group consisting of SEQ ID NO: 350 through SEQ ID NO: 361;
(bbb) a polynucleotide encoding a polypeptide useful for improving photosynthetic carbon fixation by modification of sedoheptulose 1,7-bisphosphatase activity in a plant, wherein said polynucleotide comprises a sequence selected from the group consisting of SEQ ID NO: 362 through SEQ ID NO: 366;
(ccc) a polynucleotide encoding a polypeptide useful for improving plant resistance to biotic and abiotic stress by modification of flavonoid biosynthesis, wherein said polynucleotide comprises a sequence selected from the group consisting of SEQ ID NO: 367 through SEQ ID NO: 368.

18. The method according to claim 17 wherein said polynucleotide is oriented with respect to said promoter such that transcription of said polynucleotide produces an mRNA encoding said polypeptide, and wherein said mRNA is translated to express said polypeptide in said plant.

19. The method according to claim 17 wherein said polynucleotide is oriented with respect to said promoter such that transcription from said polynucleotide produces an RNA complementary to the mRNA encoding said polypeptide, and wherein the level of said polypeptide in said plant is decreased as the result of the presence of said complementary RNA.

20. A method of producing a plant having an improved property, wherein said method comprises transforming a plant with a recombinant construct comprising a promoter region functional in a plant cell operably joined to a polynucleotide comprising coding sequence for a polypeptide associated with said property, and growing said transformed plant, wherein said polypeptide is selected from the group consisting of:
(a) a polypeptide useful for manipulating protein quality in plant cells by modification of amino acid transporters, wherein said polypeptide comprises a sequence selected from the group consisting of SEQ ID NO: 369 through SEQ ID NO: 377;
(b) a polypeptide useful for improving plants by providing protection against osmotic stress, wherein said polypeptide comprises a sequence selected from the group consisting of SEQ ID NO: 378 through SEQ ID NO: 380;
(c) a polypeptide useful for improving yield in a plant by altering sugar transport and/or metabolism, wherein said polypeptide comprises a sequence selected from the group consisting of SEQ ID NO: 378 through SEQ ID NO: 380;
(d) a polypeptide useful for providing increased vigor to a plant by modification of plant steroid biosynthesis, wherein said polypeptide comprises a sequence selected from the group consisting of SEQ ID NO: 381 through SEQ ID NO: 387;
(e) a polypeptide useful for improving crop productivity or grain composition by manipulating plant growth rate, wherein said polypeptide comprises a sequence selected from the group consisting of SEQ ID NO: 388 through SEQ ID NO: 392;
(f) a polypeptide useful for providing improved plants having cercosporin resistance, wherein said polypeptide comprises SEQ ID NO: 393;
(g) a polypeptide useful for improving plant growth and grain quality by modification of nitrogen/nitrate levels in a plant, wherein said polypeptide comprises a sequence selected from the group consisting of SEQ ID NO: 394 through SEQ ID NO: 395;
(h) a polypeptide useful for altering nitrogen utilization in a plant by modification of siroheme synthesis, wherein said polypeptide comprises a sequence selected from the group consisting of SEQ ID NO: 396 through SEQ ID NO: 398;
(i) a polypeptide useful for improving plant cold tolerance, wherein said polypeptide comprises a sequence selected from the group consisting of SEQ ID NO: 399 through SEQ ID NO: 410;
(j) a polypeptide useful for improving plant yield by modification of the cell cycle pathway, wherein said polypeptide comprises a sequence selected from the group consisting of SEQ ID NO: 411 through SEQ ID NO: 429;
(k) a polypeptide for improving plant growth by manipulating cytokinin levels or signaling pathways, wherein said polypeptide comprises a sequence selected from the group consisting of SEQ ID NO: 430 through SEQ ID NO: 444;
(l) a polypeptide useful for alteration of oil content of a seed by manipulating embryo size, wherein said polypeptide comprises a sequence selected from the group consisting of SEQ ID NO: 445 through SEQ ID NO: 447;
(m) a polypeptide useful for improving plant growth as the result of manipulating the cell cycle by modification of E2F activity, wherein said polypeptide comprises a sequence selected from the group consisting of SEQ ID NO: 448 through SEQ ID NO: 450;
(n) a polypeptide useful for reduction of senescence, wherein said polypeptide comprises a sequence selected from the group consisting of SEQ ID NO: 451 through SEQ ID NO: 461;
(o) a polypeptide useful for improving insect resistance, wherein said polypeptide comprises a sequence selected from the group consisting of SEQ ID NO: 462 through SEQ ID NO: 464;
(p) a polypeptide useful for improving cold tolerance in a plant, wherein said polypeptide comprises SEQ ID NO: 465;
(q) a polypeptide useful for improving cold or heat tolerance of a plant by alteration of fatty acid composition, wherein said polypeptide comprises a sequence selected from the group consisting of SEQ ID NO: 466 through SEQ ID NO: 469;
(r) a polypeptide useful for improving stress resistance in a plant by modification of ferritin levels, wherein said polypeptide comprises a sequence selected from the group consisting of SEQ ID NO: 470 through SEQ ID NO: 472;
(s) a polypeptide useful for improving plant herbicide resistance, wherein said polypeptide comprises a sequence selected from the group consisting of SEQ ID NO: 473 through SEQ ID NO: 475;
(t) a transcription factor polypeptide useful for improving fungal resistance, wherein said polypeptide comprises SEQ ID NO: 476;
(u) a polypeptide useful for improving plant growth and stress resistance by increasing levels of GABA, wherein said polypeptide comprises SEQ ID NO: 477;
(v) a polypeptide useful for improving cold tolerance in a plant by heat generation resulting from modification of alternatative oxidase activity, wherein said polypeptide comprises a sequence selected from the group consisting of SEQ ID NO: 478 through SEQ ID NO: 479;
(w) a polypeptide useful for improving heat tolerance in a plant, wherein said polypeptide comprises a sequence selected from the group consisting of SEQ ID NO: 480 through SEQ ID NO: 487;
(x) a polypeptide useful for improving plant growth and disease resistance by altering the activity of heterotrimeric G proteins, wherein said polypeptide comprises a sequence selected from the group consisting of SEQ ID NO: 488 through SEQ ID NO: 492;
(y) a polypeptide useful for improving homologous recombination in a plant, wherein said polypeptide comprises a sequence selected from the group consisting of SEQ ID NO: 493 through SEQ ID NO: 494;
(z) a polypeptide useful for improving tolerance to heat shock by modification of hsp90 protein function, wherein said polypeptide comprises a sequence selected from the group consisting of SEQ ID NO: 495 through SEQ ID NO: 515;
(aa) a polypeptide useful for generating improved plants having increased seed or kernel yield under drought conditions, wherein said polypeptide comprises SEQ ID NO: 516;
(bb) a polypeptide useful for improving plant growth by modification of jasmonate activity, wherein said polypeptide comprises a sequence selected from the group consisting of SEQ ID NO: 517 through SEQ ID NO: 530;
(cc) a polypeptide useful for improving plant growth by modification of nitric oxide signaling pathways, wherein said polypeptide sequence comprises SEQ ID NO: 531;
(dd) a polypeptide useful for improving plant vigor by modification of photomorphogenic response, wherein said polypeptide comprises SEQ ID NO: 532;
(ee) a polypeptide useful for improving plant growth by modification of phosphorous utilization, wherein said polypeptide comprises a sequence selected from the group consisting of SEQ ID NO: 533 through SEQ ID NO: 548;
(ff) a polypeptide useful for reducing shade avoidance in a plant by modification of phytochrome activity, wherein said polypeptide comprises a sequence selected from the group consisting of SEQ ID NO: 549 through SEQ ID NO: 578;
(gg) a polypeptide useful for improving nitrogen assimilation by modification of the TOR pathway, wherein said polypeptide comprises a sequence selected from the group consisting of SEQ ID NO: 579 through SEQ ID NO: 593;
(hh) a polypeptide useful for enhancing seed germination and growth by modification of plant hemoglobin levels, wherein said polypeptide comprises a sequence selected from the group consisting of SEQ ID NO: 594 through SEQ ID NO: 595;
(ii) a polypeptide useful for controlling apomixis or altering grain composition in a seed by manipulating polycomb proteins, wherein said polypeptide comprises a sequence selected from the group consisting of SEQ ID NO: 596 through SEQ ID NO: 600;
(jj) a polypeptide useful for improving plant growth by modification of retinoblastoma-like proteins in a plant, wherein said polypeptide comprises a sequence selected from the group consisting of SEQ ID NO: 601 through SEQ ID NO: 602;
(kk) a polypeptide useful for increasing root mass in a plant, wherein said polypeptide comprises a sequence selected from the group consisting of SEQ ID NO: 603 through SEQ ID NO: 607;
(ll) a polypeptide useful for generating early flowering in a plant, wherein said polypeptide comprises a sequence selected from the group consisting of SEQ ID NO: 608 through SEQ ID NO: 614;
(mm) a polypeptide useful for improving stalk strength in a plant, wherein said polypeptide comprises a sequence selected from the group consisting of SEQ ID NO: 615 through SEQ ID NO: 616;
(nn) a polypeptide useful for conferring virus resistance in a plant, wherein said polypeptide comprises a sequence selected from the group consisting of SEQ ID NO: 617 through SEQ ID NO: 625;
(oo) a polypeptide useful for improving yield in a plant, wherein said polypeptide comprises a sequence selected from the group consisting of SEQ ID NO: 626 through SEQ ID NO: 640;
(pp) a polypeptide useful for improving water stress tolerance in a plant by modification of wax biosynthesis, wherein said polypeptide comprises a sequence selected from the group consisting of SEQ ID NO: 641 through SEQ ID NO: 645;
(qq) a polypeptide useful for improving plant growth by altering development, wherein said polypeptide comprises a sequence selected from the group consisting of SEQ ID NO: 646 and SEQ ID NO: 650;
(rr) a polypeptide useful for improving plant yield by reducing plant height in high density populations, wherein said polypeptide is a growth regulating factor and comprises a sequence selected from the group consisting of SEQ ID NO: 647 through SEQ ID NO: 649;
(ss) a polypeptide useful for improving photosynthetic carbon fixation in a plant, wherein said polypeptide comprises a sequence selected from the group consisting of SEQ ID NO: 651 through SEQ ID NO: 654;
(tt) a polypeptide useful for improving plant growth by modification of F-box proteins, wherein said polypeptide comprises a sequence selected from the group consisting of SEQ ID NO: 655 through SEQ ID NO: 659;
(uu) a polypeptide useful for improving biotic and abiotic stress resistance in a plant by modification of the mevalonate pathway, wherein said polypeptide comprises a sequence selected from the group consisting of SEQ ID NO: 660 through SEQ ID NO: 661;
(vv) a polypeptide useful for improving resistance to oxidative stress in a plant, wherein said polypeptide comprises a sequence selected from the group consisting of SEQ ID NO: 662 through SEQ ID NO: 699;
(ww) a polypeptide useful for improving plant growth by modification of ATP production in a plant, wherein said polypeptide comprises a sequence selected from the group consisting of SEQ ID NO: 700 through SEQ ID NO: 704;
(xx) a polypeptide useful for improving plant growth by modification of ATP or ADP transport in a plant, wherein said polypeptide comprises a sequence selected from the group consisting of SEQ ID NO: 705 through SEQ ID NO: 709;
(yy) a polypeptide useful for altering fatty acid or amino acid composition of a plant seed by modification of AAA ATPase activity in a plant, wherein said polypeptide comprises a sequence selected from the group consisting of SEQ ID NO: 710 through SEQ ID NO: 711;
(zz) a polypeptide useful for improving plant yield by modification of plant architecture, wherein said polypeptide comprises a sequence selected from the group consisting of SEQ ID NO: 712 through SEQ ID NO: 717;
(aaa) a polypeptide useful for improving yield in a plant by modification of carbohydrate transport, wherein said polypeptide comprises a sequence selected from the group consisting of SEQ ID NO: 718 through SEQ ID NO: 729;
(bbb) a polypeptide useful for improving photosynthetic carbon fixation by modification of sedoheptulose 1,7-bisphosphatase activity in a plant, wherein said polypeptide comprises a sequence selected from the group consisting of SEQ ID NO: 730 through SEQ ID NO: 734;
(ccc) a polypeptide useful for improving plant resistance to biotic and abiotic stress by modification of flavonoid biosynthesis, wherein said polypeptide comprises a sequence selected from the group consisting of SEQ ID NO: 735 through SEQ ID NO: 736.

21. The method according to claim 20 wherein said polynucleotide is oriented with respect to said promoter such that transcription of said polynucleotide produces an mRNA encoding said polypeptide, and wherein said mRNA is translated to express said polypeptide in said plant.

22. The method according to claim 20 wherein said polynucleotide is oriented with respect to said promoter such that transcription from said polynucleotide produces an RNA complementary to the mRNA encoding said polypeptide, and wherein the level of said polypeptide in said plant is decreased as the result of the presence of said complementary RNA.

23. A method for introducing into a maize line an enhanced phenotype as compared to a phenotype in parental units of said maize line, said method comprising
(a) generating a population of transgenic plants comprising a variety of heterologous DNA for the transcription of which there is no known phenotype in corn,
(b) observing phenotypes for said transgenic plants,
(c) selecting seeds from transgenic plants having an unexpected enhanced phenotype, and
(d) optionally, repeating a cycle of germinating transgenic seed, growing subsequent generation plants from said transgenic seed, observing phenotypes of said subsequent generation plants and collecting seeds from subsequent generation plants having an enhanced phenotype.

24. A method according to claim 23 wherein said population of transgenic plants is produced by generating a plurality of transgenic events for a plurality of unique transgenic DNA constructs wherein each of said transgenic events comprises introducing into the genome of a parental maize line a single transgenic DNA construct comprising a promoter operably linked to heterologous DNA, wherein said transgenic DNA construct is introduced into said genome in sufficient quantity to produce transgenic cells which can be cultured into plants of transgenic maize comprising said population culturing said transgenic cells into a population of transgenic plants producing progeny transgenic seed,

25. A method according to claim 24 wherein said plurality of transgenic events is at least 2 and said plurality of unique transgenic DNA constructs is at least 20.

26. A method according to claim 24 wherein said plurality of transgenic events is at least 2 and said plurality of unique transgenic DNA constructs is at least 50.

27. A method according to claim 24 wherein said DNA construct comprises heterologous DNA operably linked to the 5′ end of a promoter region comprising a rice actin promoter and rice actin intron.

28. A method according to claim 24 further comprising crossing transgenic plants from said population with at least one other maize line to produce a hybrid population, observing phenotypes in said hybrid population and selecting seed from plants having an unexpected phenotype.
